(19) United States
(12) Patent Application Publication
(10) Pub. No.: US 2020/0375868 A1
(43) Pub. Date: Dec. 3, 2020

(54) Systemic Delivery of Polypeptides

(71) Applicants: President and Fellows of Harvard College, Cambridge, MA (US); Massachusetts Institute of Technology, Cambridge, MA (US); The Brigham and Women's Hospital, Inc., Boston, MA (US); The General Hospital Corporation, Boston, MA (US)

(72) Inventors: Denitsa M. Milanova, Boston, MA (US); George M. Church, Brookline, MA (US); Noah Davidsohn, Brookline, MA (US); Carl Schoellhammer, Medford, MA (US); Robert S. Langer, Newton, MA (US); Anna I. Mandinova, Newton, MA (US); Carlo Giovanni Traverso, Newton, MA (US); Li Li, Cambridge, MA (US)

(21) Appl. No.: 16/612,632

(22) PCT Filed: May 14, 2018
(86) PCT No.: PCT/US18/32597

§ 371 Date: Nov. 11, 2019

Related U.S. Application Data
(60) Provisional application No. 62/505,359, filed on May 12, 2017.

(51) Int. Cl. A61K 8/64; C12N 15/86; A61K 8/99; A61Q 19/08

(52) U.S. Cl. CPC A61K 8/64; C12N 15/86; A61K 8/99; C12N 2750/14143; A61K 2800/82; A61K 2800/86; A61Q 19/08

(57) ABSTRACT

A method of delivering a recombinant virus to a skin tissue is provided. The method includes applying ultrasound to the skin tissue, and administering the recombinant virus to the skin tissue.

### RELATED APPLICATION DATA

[0001] This application is a National Stage Application under 35 U.S.C. 371 of co-pending PCT application PCT/US18/32597 designating the United States and filed May 14, 2018; which claims the benefit of U.S. provisional application No. 62/505,359 filed on May 12, 2017 each of which are hereby incorporated by reference in their entireties.

### STATEMENT OF GOVERNMENT INTERESTS

[0002] This invention was made with government support under Grant Nos. HG008525, MH113279, and EB000244 from the National Institutes of Health. The government has certain rights in the invention.

### BACKGROUND

[0003] Gene therapy has shown great promise to prevent, treat and cure a variety of skin diseases and conditions in human and animals. Skin is the largest and one of the most complex organs in the human body. It performs a diverse set of functions, ranging from protection, sensation, heat regulation, absorption of gases, excretion of sweat, control of evaporation and water resistance. Skin's structure and function gradually deteriorate with age (intrinsic aging) and in response to varying environmental conditions (extrinsic aging) such as exposure to solar radiation and a variety of chemicals becoming prone to common benign and malignant skin lesions such as Seborrheic keratosis, Actinic keratosis and non-melanoma skin cancers. Furthermore, skin's health gradually declines in response to chronic conditions including HIV, diabetes, atherosclerosis, and even inadequate nutrition. As a result, skin accumulates high mutational loads evinced in altered translation of key proteins maintaining skin homeostasis. At tissue level, the stratum corneum loses its ability to barrier function, regeneration and wound healing; the epidermis becomes prone to errors in metabolic reprogramming and the rete ridges lose surface area; the dermis becomes thinner and less elastic; the sebaceous and eccrine glands contract and secrete less oils and sweat; and the Langerhans immune cells decline in number and function.

[0004] As a superficial organ, the skin is an easily accessible target for gene therapy. To perform gene therapy, recombinant viral vectors have been developed as attractive alternatives to non-viral vectors to deliver genes and nucleic acid molecules of interest to the skin. These recombinant viral vectors include recombinant retrovirus, adenovirus, adeno-associated virus (AAV), vaccinia virus and herpes simplex virus. However, the efficacy of skin gene therapy is hampered by low level of transgene expression, due to difficulty of viral permeation in the skin tissue. There is a continuing need in the art to improve the efficacy of skin gene therapy by enhancing viral permeation in the skin tissue.

### SUMMARY

[0005] Aspects of the present disclosure are directed to methods of non-invasive delivery of nucleic acid molecules including genes via recombinant viral vectors to skin tissue in vivo and in vitro. In certain embodiments, the delivery method comprises electroporation such as by applying short high voltage pulses to the skin, heat (between about 32° C.-39° C.), needleless injections such as by firing liquid at supersonic speed through the stratum corneum, pressure waves generated by laser radiation, fraction laser, or radiofrequency (about 100 kHz), magnetophoresis by external magnetic field, iontophoresis, chemical peels, abrasion techniques such as diamond or sand paper abrasion, tape stripping, and the like. In an exemplary embodiment, ultrasonic pre-treatment of skin tissue is used to enable increased tissue permeation before administering the recombinant viruses to the treated skin tissue. In one embodiment, recombinant adeno-associated viruses are used to deliver nucleic acid molecules of interest to skin tissue/cells to modify target gene expression. The methods disclosed herein are suitable for simultaneously modifying the expression of sets of target genes involved in maintaining skin homeostasis and health. Aspects of the present disclosure are directed to methods of introducing nucleic acid molecules comprising nucleic acid sequences for expression in skin cells. The nucleic acid sequences encode RNA and polypeptides that function to activate or repress target gene expression. The nucleic acid sequences can also integrate into the cell's genome and modulate target gene expression. Recombinant viral vectors are employed to package and deliver the nucleic acid molecules. For example, nucleic acid molecules are packaged in recombinant adeno-associated viral (rAAV) vectors. The methods of the present disclosure have demonstrated long-term transgene expression and modulated protein translation from rAAV vectors in animal (in vivo) and human (ex vivo and in vitro) experimental models. In some embodiments, the methods of the present disclosure include optimal tissue specificity and efficiency of gene transfer based on rAAV vector serotypes such that these vectors selectively target one, more, or all skin tissue layers and structures (i.e. stratum corneum, epidermis, basement membrane, dermis, hair follicles, and sebaceous and eccrine glands). The methods of the present disclosure improve skin gene therapies and are well-suited to enable reversal of skin aging phenotypes and phenotypes resulting from complex disease- and age-associated skin pathologies.

[0006] According to one aspect, a method of delivering a recombinant virus to a skin tissue is provided. In one embodiment, the method includes applying ultrasound to the skin tissue, and administering the recombinant virus to the skin tissue. In one embodiment, the recombinant virus is delivered to the skin tissue of a subject in vivo. In some embodiments, the skin tissue comprises native and autogeneic, isogeneic, xenogeneic and allogeneic skin tissue. In another embodiment, the recombinant virus is delivered to the skin tissue in vitro. In some embodiments, the skin tissue comprises skin explants and artificial skin tissues. In one embodiment, the ultrasound is applied prior to administering the recombinant virus. In another embodiment, the ultrasound is stopped prior to administering the recombinant virus. In some embodiments, the ultrasound is applied at a frequency between about 20 kHz and about 100 kHz. In other embodiments, the ultrasound is applied at a frequency of about 10 kHz, 20 kHz, 30 kHz, 40 kHz, 50 kHz, 60 kHz, 70 kHz, 80 kHz, 90 kHz and 100 kHz. In some embodiments, the ultrasound is applied at an intensity of about 1, 2, 3, 4, 5, 6, 7, 8, 9 and 10 W/cm². In other embodiments, the ultrasound is applied at an intensity between about 1 W/cm² and about 10 W/cm². In some embodiments, the ultrasound is applied for a duration between about one minute to about 10 minutes. In other embodiments, the ultrasound is applied for a duration of about 1, 2, 3, 4, 5, 6, 7, 8, 9 and 10 minutes. In some embodiments, the ultrasound is applied at duty cycles in the range between about 10% and 100%. In some embodiments, the ultrasound is applied at duty cycles in the range between about 10%, 25%, 50%, 75% and 100%. In certain embodiments, the ultrasound is applied topically or intra-dermally. In other embodiments, the methods further include delivering the recombinant virus to the skin tissue via electroporation, heat, needleless injections, pressure waves generated by laser radiation, fraction laser, or radiofrequency (100 kHz), magnetophoresis by external magnetic field, iontophoresis, chemical peels, abrasion techniques including diamond or sand paper abrasion, tape stripping, and the like. In some embodiments, the recombinant virus is selected from retrovirus, adenovirus, adeno-associated virus (AAV), vaccinia virus and herpes simplex virus. In other embodiments, the recombinant AAV includes serotypes 1-9. In one embodiment, the recombinant virus comprises a heterologous nucleic acid sequence. In another embodiment, the nucleic acid sequence encodes a gene which is expressible in the skin tissue. In one embodiment, expression of the gene effects treatment of a skin disease or condition. In certain embodiments, the gene is selected from COL1A1, COL3A1, TIMP1, TIMP2, SMAD2, SMAD3, CTGF, TGF-beta1, KRT6A, NOTCH1(icd), TET2, TET3, Sirt1, Sirt6, Pck1, Pparg, and Cisd2, MDH1, MDH2, Aco1, Aco2, IDH1, IDH2, IDH3, ENO1, GOT1, GOT2, MUC1, and MCU. In one embodiment, the gene encodes a green fluorescent protein (GFP). In some embodiments, the skin disease or condition includes Epidermolysis Bullosa, Recessive Dystrophic Epidermolysis Bullosa, Junctional Epidermolysis Bullosa, Epidermolysis Bullosa Simplex, Pachyonychia Congenita, Melanoma, non-melanoma skin cancer, Ichthyosis, Harlequin Ichthyosis, Sjogren-Larsson Syndrome, Xeroderma Pigmentosum, Wound Healing, Netherton Syndrome, age-associated skin pathologies, benign and malignant skin lesions, inflammatory and autoimmune skin disorders. In other embodiments, the recombinant virus is delivered to keratinocytes, epidermal stem cells, fibroblast cells, mesenchymal stem cells, immune cells, melanocytes, vascular endothelial cells, adipocytes, Merkel cells and peripheral neural cells of the skin tissue. In some embodiments, the recombinant virus is delivered to skin tissue layers and structures including stratum corneum, epidermis, basement membrane, dermis, hair follicles, blood vessels and sebaceous and eccrine glands. In certain embodiments, multiple recombinant viruses comprising multiple genes are delivered to the skin tissue. In some embodiments, the subject is human or non-human mammal. In other embodiment, the non-human mammal is selected from a mouse, rat, cow, pig, sheep, goat, and horse.

[0007] According to another aspect, a recombinant virus comprising a heterologous nucleic acid sequence is provided. In one embodiment, the nucleic acid sequence encodes a gene which is expressible in a skin tissue. In some embodiments, expression of the gene effects treatment of a skin disease or condition. In certain embodiments, the gene is selected from COL1A1, COL3A1, TIMP1, TIMP2, SMAD2, SMAD3, CTGF, TGF-beta1, KRT6A, NOTCH1(icd), TET2, TET3, Sirt1, Sirt6, Pck1, Pparg, and Cisd2, MDH1, MDH2, Aco1, Aco2, IDH1, IDH2, IDH3, ENO1, GOT1, GOT2, MUC1, and MCU. In one embodiment, the gene encodes a green fluorescent protein (GFP). In some embodiments, the recombinant virus is selected from retrovirus, adenovirus, adeno-associated virus (AAV), vaccinia virus and herpes simplex virus. In other embodiments, the recombinant AAV includes serotypes 1-9.

[0008] According to yet another aspect, a method of delivering a polypeptide to a skin tissue is provided. In one embodiment, the method includes applying ultrasound to the skin tissue, and administering a nucleic acid sequence encoding the polypeptide to the skin tissue. In another embodiment, the nucleic acid sequence encoding the polypeptide is delivered to the skin tissue of a subject in vivo. In one embodiment, the skin tissue comprises native and autogeneic, isogeneic, xenogeneic and allogeneic skin tissue. In another embodiment, the nucleic acid sequence encoding the polypeptide is delivered to the skin tissue in vitro. In one embodiment, the skin tissue comprises skin explants and artificial skin tissues. In another embodiment, the ultrasound is applied prior to administering the nucleic acid sequence encoding the polypeptide. In one embodiment, the ultrasound is stopped prior to administering the nucleic acid sequence encoding the polypeptide. In some embodiments, the ultrasound is applied at a frequency between about 20 kHz and about 100 kHz. In other embodiments, the ultrasound is applied at a frequency of about 10 kHz, 20 kHz, 30 kHz, 40 kHz, 50 kHz, 60 kHz, 70 kHz, 80 kHz, 90 kHz and 100 kHz. In some embodiments, the ultrasound is applied at an intensity of about 1, 2, 3, 4, 5, 6, 7, 8, 9 and 10 W/cm². In other embodiments, the ultrasound is applied at an intensity between about 1 W/cm² and about 10 W/cm². In some embodiments, the ultrasound is applied for a duration between about one minute to about 10 minutes. In other embodiments, the ultrasound is applied for a duration of about 1, 2, 3, 4, 5, 6, 7, 8, 9 and 10 minutes. In some embodiments, the ultrasound is applied at duty cycles in the range between about 10% and 100%. In some embodiments, the ultrasound is applied at duty cycles in the range between about 10%, 25%, 50%, 75% and 100%. In certain embodiments, the ultrasound is applied topically or intra-dermally. In certain embodiments, the nucleic acid sequence encoding the polypeptide is DNA or RNA. In one embodiment, wherein the polypeptide is expressible in the skin tissue. In another embodiment, expression of the polypeptide effects treatment of a skin disease or condition. In some embodiments, the nucleic acid sequence encodes a gene selected from COL1A1, COL3A1, TIMP1, TIMP2, SMAD2, SMAD3, CTGF, TGF-beta1, Anti-MMP1, anti-MMP2, KRT6A, NOTCH1(icd), TET2, TET3, Sirt1, Sirt6, HIF-1a, Pten, Pck1, Pparg, and Cisd2, MDH1/2, Aco1/2, IDH1/2/3, Enolase, GOT1/2, MUC1, and MCU. In one embodiment, the nucleic acid sequence encodes a green fluorescent protein (GFP). In some embodiments, the skin disease or condition includes Epidermolysis Bullosa, Recessive Dystrophic Epidermolysis Bullosa, Junctional Epidermolysis Bullosa, Epidermolysis Bullosa Simplex, Pachyonychia Congenita, Melanoma, non-melanoma skin cancer, Ichthyosis, Harlequin Ichthyosis, Sjogren-Larsson Syndrome, Xeroderma Pigmentosum, Wound Healing, Netherton Syndrome, age-associated skin pathologies, benign and malignant skin lesions, inflammatory and autoimmune skin disorders. In some embodiments, the nucleic acid sequence encoding the polypeptide is delivered to keratinocytes, epidermal stem cells, fibroblast cells, mesenchymal stem cells, immune cells, melanocytes, vascular endothelial cells, adipocytes, Merkel cells and peripheral neural cells of the skin tissue. In other embodiments, the nucleic acid sequence encoding the polypeptide is delivered to skin tissue layers and structures including stratum corneum, epidermis, basement membrane, dermis, hair follicles, blood vessels and sebaceous and eccrine glands. In some embodiments, multiple nucleic acid sequences encoding multiple polypeptides are delivered to the skin tissue. In some embodiments, native polypeptide is delivered to the skin tissue.

[0009] According to one aspect, a heterologous nucleic acid sequence encoding a gene which is expressible in a skin tissue is provided. In one embodiment, expression of the gene effects treatment of a skin disease or condition. In some embodiments, the heterologous nucleic acid encodes a gene selected from COL1A1, COL3A1, TIMP1, TIMP2, SMAD2, SMAD3, CTGF, TGF-beta1, Anti-MMP1, anti-MMP2, KRT6A, NOTCH1(icd), TET2, TET3, Sirt1, Sirt6, HIF-1a, Pten, Pck1, Pparg, Cisd2, MDH1/2, Aco1/2, IDH1/2/3, Enolase, GOT1/2, MUC1, and MCU. In one embodiment, the heterologous nucleic acid sequence encodes a green fluorescent protein (GFP).

[0010] Further features and advantages of certain embodiments of the present invention will become more fully apparent in the following description of embodiments and drawings thereof, and from the claims.

### BRIEF DESCRIPTION OF THE DRAWINGS

[0011] The patent or application file contains at least one drawing executed in color. Copies of this patent or patent application publication with color drawing(s) will be provided by the Office upon request and payment of the necessary fee. The foregoing and other features and advantages of the present embodiments will be more fully understood from the following detailed description of illustrative embodiments taken in conjunction with the accompanying drawings in which:

[0012] FIG. 1 shows images and image processing algorithm for the estimation of native EGFP fluorescence in large skin tissue sections.

[0013] FIGS. 2 A & C show results of fold increase in signal intensity relative to the signal of negative control which was treated with ultrasound but no therapy was administered. FIGS. 2 B & D show results of percent transduced tissue area in 30-year old (A, B) and 52-year-old (C, D) donors.

[0014] FIGS. 3A-3E show immunofluorescent images of human breast skin explants treated with recombinant AAV vectors expressing EGFP. The tissues were stained with Vimentin, anti-EGFP, and Cytokeratin 19. FIG. 3A. Composite overlay images in 4 fluorescent channels, starting from blue, green, red, and far red. FIG. 3B. anti-EGFP images for control+treated with AAV2/1 AAV2/2, AAV2/8, and AAV2/9. Higher magnification images for exemplary skin structures: FIG. 3C. Epidermis (AAV2/2), FIG. 3D. Hair follicle and the niche (AAV2/1), and FIG. 3E. Sebaceous glands (AAV2/9). All rAAV hybrids are packaged with EGFP and used to quantify gene transfer efficiency.

[0015] FIGS. 4A-4D depict immunofluorescent images of human facial skin explants treated with recombinant AAV vectors expressing EGFP.-control (FIG. 4A and FIG. 4B) vs treated with AAV2/2: EGFP (signal is shown in white) (FIG. 4C and FIG. 4D). FIG. 4A. K15-positive, EGFP-negative proliferating stem cells in hair follicles. FIG. 4B. K15-positive, EGFP-negative stem cells located in the basement membrane. FIG. 4C. K15-positive, EGFP-positive proliferating stem cells in hair follicles. FIG. 4D. K15-positive, EGFP-positive stem cells located in the basement membrane.

[0016] FIGS. 5A-5F show methods and results of in vivo delivery of gene therapy. FIGS. 5A-5D (Steps 1-4). FIG. 5A. Step 1: Skin was pretreated via ultrasound of 5 W/cm² intensity, 50% duty cycle of 30s, and 20 kHz frequency; FIG. 5B. Step 2: rAAV2/2: COL3A1 was delivered topically; FIG. 5C. Step 3: therapy was let passively diffuse; and FIG. 5D. Step 4: tissue was harvested and analyzed by Western blot to quantify protein content. FIG. 5E Western blot and FIG. 5F protein quantification of Western blot for target gene COL3A1 and housekeeping gene ACTB in human skin control samples, and for two biological replicates (2 hairless mice). The negative control tissue was taken from the mouse stomach. Signal is normalized relative to the protein expression of ACTB and negative untreated control tissue in two biological replicates. Human skin was used as a control tissue for Collagen III amount. Error bars represent the standard error to the mean of 3 tissue samples within a biological replicate. Native content of Collagen III in human skin is shown as positive control.

[0017] FIGS. 6A-6G show methods and results of in vitro delivery of rAAV2/2: COL3A1. FIGS. 6A-6D. (Steps 1-4). FIG. 6A. Step 1: Skin was pretreated via ultrasound of 5 W/cm² intensity, 50% duty cycle of 30s, and 20 kHz frequency; FIG. 6B. Step 2: rAAV2/2: COL3A1 was delivered topically; FIG. 6C. Step 3: therapy was let passively diffuse; and FIG. 6D. Step 4: tissue was harvested and analyzed by RT-qPCR and Western blot to quantify changes in gene expression protein content, respectively. FIG. 6E. RT-qPCR of GFP and COL3A1 expression in samples treated with rAAV2/2: EGFP and rAAV2/2: COL3A1. Signal is expressed as fold change overexpression of target genes (GFP and COL3A1) normalized to ACTB expression and negative untreated control sample; FIG. 6F. Protein quantification using Western blot for target genes GFP and COL3A1 and housekeeping gene ACTB. Signal is normalized relative to the protein expression of ACTB and negative untreated control tissue in a single reconstructed skin tissue. Untreated tissue was used as a control, and FIG. 6G. Histological analysis of control and rAAV2/2: COL3A1-treated tissue samples using Picro-sirius red and trichrome staining (arrows point to regions of newly synthesized collagen fibrils).

[0018] FIGS. 7A-7B show schematic illustration of the network propagation method according to an embodiment of the disclosure. FIG. 7A shows three identical networks before network propagation with three different nodes were assigned with values. FIG. 7B demonstrates the network after propagation. Higher brightness of a node responds to a higher score.

[0019] FIGS. 8A-8B show the visualization results of the networks according to certain embodiments of the disclosure. FIG. 8A shows a proposed network built upon the top 10 most significantly enriched (non-disease) KEGG pathways of the analysis with an FDR q-value<0.01. FIG. 8B shows the top genes with highest scoring (as generated by integrating the distant network and gene expression of the neighborhood) involved in one or multiple of the enriched top pathways.

[0020] FIGS. 9A-9B show results of MDH2 levels in aging skin progenitors of primary cultures. FIG. 9A shows protein production of MDH2 in aging skin progenitors of primary cultures that were measured using Western blot. FIG. 9B shows quatitative measure of FIG. 9A in bar graph.

[0021] FIGS. 10A-10H show results of gene transfer to whole skin according to certain embodiments of the disclosure. FIG. 10A shows a schematic of a length-optimized modular vector with EGFP gene inserted. FIG. 10B shows a typical workflow of topical delivery of AAV vectors to human skin explants pre-treated with low frequency (20 kHz) ultrasound. FIG. 10C shows results of EGFP expression levels in human skin explants after AAV-treatment, human skin explants were cultured in 1 cm-transwells for 8 days after which tissues were analyzed for gene expression. FIG. 10D shows the results of the absolute gene expression copy number that was evaluated based on a standard curve built upon known amounts of input transgene. FIGS. 10C and 10D show mean and standard error to the mean of N=2 replicates. FIGS. 10E-10F show results of AAV2 EGFP expression levels administered to human skin explants under various promoters. FIGS. 10G-10H show results of AAV2/8-hEF1a-EGFP expression levels administered to human skin explants.

[0022] FIGS. 11A-11E show results of gene delivery efficiency to dermal skin cells according to certain embodiments of the disclosure. FIG. 11A shows the process for one untreated, one ultrasound-treated, and one AAV-treated tissue sample. A schematic illustration of AAV-CMV-EGFP vector is shown in FIG. 11B. Recombinant AAV viruses of serotypes 2/1, 2/2, 2/5, 2/6.2, 2/8, 2/9 were administered at a dose of 2E+11 GC per tissue explant and the fluorescence signal is reported for two donors, one young (of ages 30) and one old (of age 52) as shown in FIG. 11C. FIG. 11D shows a heatmap illustrating the amount of protein expression in the tissue samples. FIG. 11E shows the results of EGFP expression in populations of single EGFP-positive cells and double EGFP/K15-positive cells.

[0023] FIGS. 12A-12C show the results of EGFP expression in keratinocyte cells. FIG. 12A shows EGFP levels in various AAV serotypes. FIG. 12B shows EGFP levels using AAV2/2 at a dose of 2E+11 GC per explant under CMV, CASI, shEF1a, and hEF1a promoters. FIG. 12C shows a dose dependency response using AA8-hEF1a from 5E+10 to 5E+11 GC per explant.

[0024] FIGS. 13A-13D show results of long-term expression of genes in skin tissues according to certain embodiments of the disclosure. FIG. 13A shows the differentiated keratinocyte population that was further analyzed for therapy efficacy towards progenitor stem cells expressing markers either for Cytokeratin 15, a6-Integrin, or both. Based on their ability to infect progenitor and stems cells, the top 5 most efficacious AAV-serotypes measured by GFP and K15 signal are listed in FIG. 13B. FIG. 13C shows results of expression of K15 and a6-integrin using various AAV vectors. FIG. 13D shows the results of the correlation of infection towards epidermal stem and progenitor cells.

[0025] FIGS. 14A-14E show results of expression of human collagen III (alpha domain) driven by a truncated hEF1a promoter in human skin explants according to certaine embodiments of the disclosure. FIG. 14A shows a diagram of delivery of rAAV to skin using low frequency ultrasound. FIG. 14B shows results of Collagen III expression in the skin explants. FIG. 14C shows the results of protein levels for Collagen III analyzed by Western blot. FIG. 14D shows results of Collagen III expression in the another donor skin explants. FIG. 14E shows the results of protein levels for Collagen III analyzed by Western blot.

[0026] FIGS. 15A-15B shows the results of modulation of 4 age-related genes in SKH-1E hairless mice. FIG. 15A shows (mouse) KRT6A, (human) TET3, (mouse) TGFb1, and (human) COL3A1 genes. FIG. 15B shows results of gene modulation of the four age-associated genes in SKH-1E hairless mice.

[0027] FIGS. 16A-16C show results of long-term expression of Collagen III in in vivo skin rebuilding of skin's extracellular matrix according to certain embodiments of the disclosure. FIG. 16A shows a collagen III production curve as a function of time from 1 week to 32 weeks. FIG. 16B show expression protein levels that were determined by Western blot on mouse skin lysates for N=8 mice. FIG. 16C shows collagen III levels in human skin and levels were compared relative to the last data point in the mouse in vivo experiment.

[0028] FIGS. 17A-17B show the results of ultraclean production and purification of rAAV according to certain embodiments of the disclosure. FIG. 17A shows results of high VP protein purity. FIG. 17B shows an image of the virus under the transmission electron microscopy.

[0029] FIGS. 18A-18B show an inflammatory panel at Day 3 and Day 8, respectively, run on epidermal cells dissociated from human skin explants after treatment with rAAV-GFP therapy via ultrasound. At Day 3 (FIG. 18A), no inflammatory response above the baseline levels was detected, while at Day 8 (FIG. 18B) a minor transient response was observed as evidenced by slightly increased gene expression levels of Interferon alpha-1 (INFa1) and Interferon beta-1 (INFb1).

### DETAILED DESCRIPTION

[0030] The present disclosure describes a method of systemic delivery of a polypeptide to a subject including genetically modifying target skin cells within skin of a subject using an engineered virus or nucleic acid sequences. The engineered virus includes one or more genomic nucleic acid sequences and one or more foreign nucleic acid sequences encoding one or more target polypeptides. The one or more genomic nucleic acid sequences and the one or more nucleic acid sequences encoding one or more target polypeptides are introduced into the target skin cells to produce genetically modified target skin cells. The genetically modified target skin cells produce the one or more target polypeptides.

[0031] According to one aspect, an engineered virus is administered to the skin of the subject in a manner to direct the engineered virus to the target skin cells. Various administration methods are contemplated including electroporation, heat, needleless injections, pressure waves generated by laser radiation, fraction laser, or radiofrequency (about 100 kHz), magnetophoresis by external magnetic field, iontophoresis, chemical peels, abrasion techniques including diamond or sand paper abrasion, tape stripping, and the like.

[0032] According to one aspect, the skin of the subject may be treated so as to permeabilize the stratum corneum to the presence of the engineered virus or nucleic acid sequences or otherwise improve efficiency of the engineered virus or nucleic acid sequences to traverse the stratum corneum to the target skin cells. After treating the skin surface, the engineered virus or nucleic acid sequences may be topically administered to the skin surface and the engineered virus or nucleic acid sequences may passively diffuse to the target skin cells whereupon the engineered virus infects the target cells to include the one or more nucleic acid sequences encoding one or more target polypeptides, or whereupon the nucleic acid sequences encoding one or more target polypeptides transduce the target cells. The one or more target polypeptides are produced by the genetically modified target cells. In some embodiments, the one or more target polypeptides are excreted from the genetically modified target cells and into the blood stream of the subject. According to one aspect, the one or more target polypeptides are excreted from the genetically modified target cells in a manner to provide a prolonged release of the one or more target polypeptides into the bloodstream of the subject.

[0033] According to one aspect, a delivery platform is provided that utilizes human skin to enable a single-step, extended production, such as year-long production of biologics wherein gene-encoded vectors are topically administered to skin in a non-invasive manner so as to treat or prevent a disease. Skin cells are provided with non-integrative viral vectors which, according to one embodiment, may lack specific cytotoxicity and pathogenicity. Delivery of the viral vectors is achieved by “needleless” methods leveraging breakage of the stratum corneum. The genetic modification of skin cells to include the gene-encoded vectors provides for long-lived and efficient translation of a polypeptide, such as a therapeutic agent in vivo to provide a safe and effective gene transfer for treatment or prevention. According to one aspect, skin is pretreated using noninvasive technology, such as ultrasound or microdermabrasion, to premeabilize or score or remove the stratum corneum. The engineered virus, such as a gene-encoding adeno-associated virus (“AAV particles”) is topically administered and delivered to the pretreated skin, which may be a section of skin near active lymph nodes. According to one aspect, target cells, such as dermal fibroblasts, endosome the AAV particles and the AAV particles release the DNA contained therein into the fibroblast cell nucleus. The fibroblast cells translate and secrete the one or more polypeptides to the intercellular matrix of the skin tissue or blood stream. The polypeptides are present within the intercellular matrix of the skin tissue or blood system for therapy or prevention. For example, the one or more polypeptides may be broadly neutralizing antibodies present within the intercellular matrix of the skin tissue or the blood system to prevent infection. In this manner, the skin may be transformed into an in vivo bioreactor for the production of biologics, such as antibodies, for transfer into the blood stream.

[0034] Embodiments of the present disclosure are directed to methods of delivering nucleic acid molecules of interest via recombinant viruses to a skin tissue. In addition to gene therapies correcting for one gene as in rare genetic diseases, the disclosed method also includes delivery of multiple sets of genes along key aging and disease signaling pathways affecting skin tissues so as to globally restore healthy and youthful transcriptional and translational profiles of skin cells and tissues. In exemplary embodiments, the method includes two major steps. In step one, ultrasound is applied to a skin tissue to increase tissue permeation. In step two, recombinant viruses carrying foreign nucleic acid molecule(s)/gene(s) of interests are delivered to the skin tissue.

[0035] Ultrasound treatment of skin has been known. A skilled in the art can choose the appropriate ultrasound device according to an application. To increase skin tissue permeation, ultrasound is applied to the skin tissue. A skilled in the art can determine the frequency, intensity and duration of ultrasound application that is effective for a specific purpose. In an exemplary embodiment, a treatment with ultrasound at 20 kHz frequency is applied at an intensity of less than 8 W/cm² for up to one minute at 50% duty cycle. The ultrasonic pre-treatment of skin tissue improves tissue diffusivity by increasing its effective diffusion coefficient. This process is enabled by the disruption of skin's stratum corneum.

[0036] Alternatively, other delivery methods can be used to deliver the recombinant viruses to the skin. These delivery methods comprise electroporation such as by applying short high voltage pulses to the skin, heat (between about 32° C. and 39° C.), needleless injections such as by firing liquid at supersonic speed through the stratum corneum, pressure waves generated by laser radiation, fraction laser, or radiofrequency (about 100 kHz), magnetophoresis by external magnetic field, iontophoresis, chemical peels, abrasion techniques such as diamond or sand paper abrasion, tape stripping, and the like. A skilled in the art can choose the appropriate delivery method according to an application. These methods can be used in combination with the method of ultrasound pre-treatment of skin and administering of the recombinant viruses as disclosed herein.

[0037] According to one aspect, viral vectors may be selected based on the ability to target cell types in a specific manner. Such viral vectors may be identified by multiplexed screening of hybrid capsid variations of adeno-associated viruses (“AAVs”). Hybrid AAV constructs typically exhibit less immunogenicity than the wild-type AAV, and have greater tissue specificity.

[0038] A large set of existing viral serotypes is optimized, synthesized and tested in human organotypic cultures. Human abdominal skin is cultured ex vivo, using native fluorescence of reporter genes, FACS, and in situ screening approaches. The method is high-throughput, allows for combinatorial optimization, and accounts for donor-to-donor variability related to immune response and metabolic state. According to one aspect, a human skin explant model is utilized that preserves the physiological complexity, the proliferative capacity and the structural integrity of all skin components for up to 28 days. Viable explants are utilized with a surface area of 15-20 mm to enable topical treatment with test agents and compositions.

[0039] According to one aspect, rAAV vector serotypes exhibit tissue specificity and efficiency of gene transfer. To establish delivery efficiency, the native fluorescence was studied of a reporter gene (rAAV: EGFP) distributed over a large surface area in full thickness human (breast) skin tissues (16 mm×2 mm in cross-sectional area) maintained in a culture dish for 24 hours, post-treatment. To enable quantification, the native fluorescence was studied of a reporter gene distributed over a large surface area in full thickness human (breast) skin tissues cultured for 24 hours post-treatment. The signal of EGFP in frozen samples (16 mm×1 mm×20 μm) was analyzed and quantified using a custom MatLab code for image post-processing. This algorithm executes flat-field and background corrections and creates a logical mask of the image. According to one aspect, the skin of the subject may be treated prior to topical application of the engineered virus so as to permeabilize the stratum corneum or otherwise The use of recombinant RNA or DNA viral based vector systems for the delivery of nucleic acids take advantage of highly evolved processes for targeting a virus to specific cells in the skin tissue and trafficking the viral payload to the nucleus. According to certain embodiments, recombinant viral vectors can be administered directly to the skin of a subject (in vivo) or they can be administered to skin tissues or cells in vitro, and skin tissues or cells that were modified by the recombinant viruses may optionally be grafted or administered back to the subject (ex vivo). Conventional recombinant viral based vector systems can include retroviral, lentivirus, adenoviral, adeno-associated virus (AAV), vaccinia virus and herpes simplex virus vectors for gene transfer. Of these viral vectors, recombinant AAV is thought to be the safest due to its lack of pathogenicity. Integration in the host genome is possible with the retrovirus and lentivirus vector transfer methods, often resulting in long term expression of the inserted transgene. Additionally, high transduction efficiencies using these recombinant viruses have been observed in many different cell types and target tissues. In certain embodiments, following ultrasound treatment of the skin, rAAV vectors containing genes of interest are topically applied to the skin tissue and let passively diffuse to reach skin cells in both epidermal and dermal skin layers. The tropism of an AAV can be altered by different capsid proteins. A skilled in the art can select appropriate rAAV serotype, including serotypes 1-9 based on the tropism for a particular cell type. Table 1 shows a list of non-limiting target genes and their functions for skin gene therapy according to certain embodiments of the disclosure.

TABLE 1
A list of target genes.
1. Strengthen the dermis by ECM restructuring

| | |
|---|---|
| COL1A1 | Precursor for collagen type I |
| COL3A1 | Precursor for collagen type III |
| TIMP1 | Tissue MMP protease inhibitors1 |
| TIPM2 | Tissue MMP protease inhibitors2 |
| SMAD2 | Receptor-regulated Smad2 |
| SMAD3 | Receptor-regulated Smad3 |
| CTGF | Connective tissue growth factor |
| TGF-β1 | Transforming growth factor beta 1 |

2. Restore skin barrier function by targeting epidermal cell turnover
3. Prevent non-melanoma skin cancer by modulating tumor suppressor genes

| | |
|---|---|
| KRT6A | Keratin 6 |
| NOTCH1(icd) | Notch1 intracellular domain |
| TET2 | Tet methylcytosine dioxygenase 2 |
| TET3 | Tet methylcytosine dioxygenase 3 |

4. Improve metabolic state

| | |
|---|---|
| Sirt1 | Sirtuin 1 |
| Sirt6 | Sirtuin 6 |
| Pck2 | Phosphoenolpyruvate carboxykinase 1 |
| Pparg | Peroxisome proliferator activated |
| | receptor gamma |
| Cisd2 | CDGSH iron sulfur domain 2 |

5. Improve epidermal stem cell metabolism and reprogramming

| | |
|---|---|
| MDH1 | Malate dehydrogenase 1 |
| MDH2 | Malate dehydrogenase 2 |
| Aco1 | Aconitase 1 |
| Aco2 | Aconitase 2 |
| IDH1 | Isocitrate dehydrogenase 1 |
| IDH2 | Isocitrate dehydrogenase 2 |
| IDH3 | Isocitrate dehydrogenase 3 |
| ENO1 | Enolase 1 |
| GOT1 | Glutamic-Oxaloacetic Transaminase 1 |
| GOT2 | Glutamic-Oxaloacetic Transaminase 2 |
| MUC1 | Mucin 1 |
| MCU | Mitochondrial Calcium Uniporter |

[0040] Embodiments of the present disclosure contemplate delivery of nucleic acids encoding genes producing extracellular matrix proteins including but not limited to COL1A1, COL3A1, TIMP1, TIMP2, SMAD2, SMAD3, CTGF, TGF-beta1) (Table 1, 1). The disclosed methods contemplate combating the age-related alterations of the dermis; the largest portion of the skin. The bulk of the epidermis is composed of collagenous extracellular matrix, which confers mechanical strength, elasticity and resilience to the skin. These functions are failing in both chronologically aged and photo aged skin due to alterations in the expression levels of extracellular proteins. The disclosed methods contemplate restoring “youthfull” levels of the extracellular matrix to counteract aging defects.

[0041] Embodiments of the present disclosure further contemplate delivery of nucleic acids encoding genes controlling the proper epidermal differentiation and renewal (Table 1, 2).

[0042] Embodiments of the present disclosure also contemplate delivery of nucleic acids encoding genes including but not limited to KRT6A, NOTCH1(icd), TET2, and TET3 (Table 1, 3). Photoaged skin sustains more numerous than any other tissue insults to its DNA. As a consequence, skin undergoes “extrinsic aging”, which at molecular level is caused by the high mutational loads evinced in the epidermis of all healthy individuals as early as at the age of 40. The continued degradation (i.e. aging) of the skin is the major factor leading to easily observable changes in skin appearance and pigmentation, and on the other end of the spectrum to onsets of benign and malignant skin lesions such as seborrheic keratoses, actinic keratoses and non-melanoma skin cancer. The disclosed methods contemplate restoring the proper epidermal homeostasis in photoaged skin by delivering genes encoding wild type (not mutated) determinants of epidermal differentiation (Notch) and stem cell renewal (Krt6A, TET2/3).

[0043] Embodiments of the present disclosure also contemplate methods for reversing age related alterations in the skin (Table 1, 4 & 5). The disclosure provides for a gene therapy method for the delivery of nucleic acids encoding Sirt1, Sirt6, Pck1, Pparg, and Cisd2, MDH1/2, Aco1/2, IDH1/2/3, Enolase, GOT1/2, MUC1, and MCU. The metabolic state of epidermal progenitors is emerging as an important determinant of skin age. In the epidermis, stem cell's commitment to differentiation, triggered by an increase in intracellular calcium, corresponds to a critical metabolic switch from cytosolic glycolysis to mitochondrial oxidative phosphorylation (OXPHOS). Alterations in mitochondrial OXPHOS is associated with failure to maintain functioning “youth” epidermis. Importantly, the capacity to elevate mitochondrial respiration fails in aging epidermal stem cells simultaneously with decreased expression of rate-limiting mitochondrial enzymes. Thus, to combat the failure in the switch to mitochondrial OXPHOS at the onset of commitment to differentiation during skin aging, the disclosed methods contemplate delivering multiple genes affecting key metabolic pathways to reverse the effects of aging.

[0044] Different skin layers, structures and cells can be targeted for gene delivery according to certain embodiments of the disclosed methods. The skin is composed of diverse cells derived from three distinct embryonic origins: neurectoderm, mesoderm, and neural crest. Recombinant viral vectors can be delivered to one or more of the three layers of the skin: the epidermis, dermis, and hypodermis. The epidermis, the outermost layer, is primarily composed of stratified squamous epithelium of keratinocytes, which is derived from neurectoderm and comprises over ninety percent of epidermal cells. The stratified squamous epithelium is further divided into four layers, starting with the outermost layer: stratum corneum (SC), stratum granulosum (SG), stratum spinosum (SS), and stratum basale (SB). Cells of the epidermis including keratinocytes which are responsible for the cohesion of the epidermal structure and the barrier function, pigment-containing melanocytes, antigen-processing Langerhans cells, and pressure-sensing Merkel cells can be targeted by the viral vectors.

[0045] The dermis is a connective tissue that is responsible for the mechanical properties of the skin. It is composed of fibroblasts of mesoderm origin, which lie within an extracellular specialized matrix. Collagens are interwoven with elastin, proteoglycans, fibronectin, and other components. The epidermis and dermis are connected by a basement membrane that is composed of various integrins, laminins, collagens, and other proteins that play important roles in regulating epithelial-mesenchymal cross-talk. The superficial papillary dermis is arranged in ridge-like structures called the dermal papillae, which contains microvascular and neural networks and extends the surface area for these epithelial-mesenchymal interactions. Sebaceous glands, eccrine glands, apocrine glands and hair follicles are of neurectoderm origin and develop as downgrowths of the epidermis into the dermis. Outer root sheath of the hair follicle is contiguous with the basal epidermal layer. In addition, the dermis also contains blood vessels and lymphatic vessels of mesoderm origin, and sensory nerve endings of neural crest origin. The hypodermis, which is deep to the dermis, is composed primarily of adipose tissue of mesoderm origin, and separates the dermis from the underlying muscular fascia. Viral vectors can also target these cells, glands, and structures of the dermis and hypodermis.

[0046] Recombinant viral vectors can also target skin-specific stem cells which possess the ability for skin tissue to self-renew. Multipotent or unipotent skin stem cells are slowly-cycling cells that reside in at least five distinct niches in the skin: basal (innermost) layer of epidermis, hair follicle bulge, base of sebaceous gland, dermal papillae, and dermis. Not only are these stem cells critical for the long-term maintenance of the skin tissue but also are activated by wounding to proliferate and regenerate the tissue. Skin-specific stem cells include hair follicle stem cells for hair follicle and continual hair regeneration, melanocyte stem cells giving rise to the melanocytes in both the hair matrix and epidermis, stem cells at the base of the sebaceous gland for continually generating terminally differentiated sebocytes, which degenerate to release lipids and sebum through the hair canal and lubricate the skin surface, mesenchymal stem cells that giving rise to fibroblasts, nerves and adipocytes, and a skin-derived precursor stem cell (SKP) distinct from mesenchymal stem cells.

[0047] It is to be understood that the basic concepts of the present disclosure described herein are not limited by cell type. Further, cells include any in which it would be beneficial or desirable to regulate a target nucleic acid. Such cells may include those which are deficient in expression of a particular protein leading to a disease or detrimental condition of the skin. Such diseases or detrimental conditions are readily known to those of skill in the art. According to the present disclosure, the nucleic acid responsible for expressing the particular protein may be targeted by the methods described herein and a transcriptional activator resulting in upregulation of the target nucleic acid and corresponding expression of the particular protein. In this manner, the methods described herein provide therapeutic treatment. Such cells may include those which over express a particular protein leading to a disease or detrimental condition. Such diseases or detrimental conditions are readily known to those of skill in the art. According to the present disclosure, the nucleic acid responsible for expressing the particular protein may be targeted by the methods described herein and a transcriptional repressor resulting in downregulation of the target nucleic acid and corresponding expression of the particular protein. In this manner, the methods described herein provide therapeutic treatment.

[0048] According to one aspect, the cell is a mammalian cell. According to one aspect, the cell is a human cell. According to one aspect, the cell is a stem cell whether adult or embryonic. According to one aspect, the cell is a pluripotent stem cell. According to one aspect, the cell is an induced pluripotent stem cell. According to one aspect, the cell is a human induced pluripotent stem cell. According to one aspect, the skin cell is in vitro, in vivo or ex vivo.

[0049] According to certain aspects, the skin tissue is in vivo, ex vivo, or in vitro. According to certain aspects, the skin tissue includes skin grafts, explants, artificial skin tissues and skin substitutes.

[0050] The skin tissues and cells can derive from a subject of a vertebrate, preferably a mammal, more preferably a human. Mammals include, but are not limited to, murines, simians, humans, farm animals, sport animals, and pets. Tissues, cells and their progeny of a biological entity obtained in vivo or cultured in vitro are also encompassed.

[0051] Complex signaling pathways that control self-renewal, proliferation, and differentiation are critical for maintaining skin homeostasis and regeneration. The methods of the present disclosure are amenable for skin gene therapy and genome editing therapy that are feasible for modulate gene expression and genome editing of target molecules in the signaling pathways related to maintaining skin homeostasis and regeneration. According to certain aspects, recombinant viral vectors can be designed to combine with the CRISPR system for delivery of nucleic acid molecules that alter target genome and modulate target gene expression of skin cells. For example, the CRISPR type II system is a recent development that has been utilized for genome editing in a broad spectrum of species. See Friedland, A. E., et al., Heritable genome editing in C. elegans via a CRISPR-Cas9 system. Nat Methods, 2013. 10(8): p. 741-3, Mali, P., et al., RNA-guided human genome engineering via Cas9. Science, 2013. 339(6121): p. 823-6, Hwang, W. Y., et al., Efficient genome editing in zebrafish using a CRISPR-Cas system. Nat Biotechnol, 2013, Jiang, W., et al., RNA-guided editing of bacterial genomes using CRISPR-Cas systems. Nat Biotechnol, 2013, Jinek, M., et al., RNA-programmed genome editing in human cells. eLife, 2013. 2: p. e00471, Cong, L., et al., Multiplex genome engineering using CRISPR/Cas systems. Science, 2013. 339(6121): p. 819-23, Yin, H., et al., Genome editing with Cas9 in adult mice corrects a disease mutation and phenotype. Nat Biotechnol, 2014. 32(6): p. 551-3. CRISPR is particularly customizable because the active form consists of an invariant Cas9 protein and an easily programmable guide RNA (gRNA). See Jinek, M., et al., A programmable dual-RNA-guided DNA endonuclease in adaptive bacterial immunity. Science, 2012. 337(6096): p. 816-21. Of the various CRISPR orthologs, the Streptococcus pyogenes (Sp) CRISPR is the most well-characterized and widely used. The Cas9-gRNA complex first probes DNA for the protospacer-adjacent motif (PAM) sequence (−NGG for Sp Cas9), after which Watson-Crick base-pairing between the gRNA and target DNA proceeds in a ratchet mechanism to form an R-loop. Following formation of a ternary complex of Cas9, gRNA, and target DNA, the Cas9 protein generates two nicks in the target DNA, creating a double-strand break (DSB) that is predominantly repaired by the non-homologous end joining (NHEJ) pathway or, to a lesser extent, template-directed homologous recombination (HR). CRISPR methods are disclosed in U.S. Pat. Nos. 9,023,649 and 8,697,359. See also, Fu et al., Nature Biotechnology, Vol. 32, Number 3, pp. 279-284 (2014). Additional references describing CRISPR-Cas9 systems including nuclease null variants (dCas9) and nuclease null variants functionalized with effector domains such as transcriptional activation domains or repression domains include J. D. Sander and J. K. Joung, Nature biotechnology 32 (4), 347 (2014); P. D. Hsu, E. S. Lander, and F. Zhang, Cell 157 (6), 1262 (2014); L. S. Qi, M. H. Larson, L. A. Gilbert et al., Cell 152 (5), 1173 (2013); P. Mali, J. Aach, P. B. Stranges et al., Nature biotechnology 31 (9), 833 (2013); M. L. Maeder, S. J. Linder, V. M. Cascio et al., Nature methods 10 (10), 977 (2013); P. Perez-Pinera, D. D. Kocak, C. M. Vockley et al., Nature methods 10 (10), 973 (2013); L. A. Gilbert, M. H. Larson, L. Morsut et al., Cell 154 (2), 442 (2013); P. Mali, K. M. Esvelt, and G. M. Church, Nature methods 10 (10), 957 (2013); and K. M. Esvelt, P. Mali, J. L. Braff et al., Nature methods 10 (11), 1116 (2013).

[0052] The practice of the disclosed methods employs, unless otherwise indicated, conventional techniques of immunology, biochemistry, chemistry, molecular biology, microbiology, cell biology, genomics and recombinant DNA, which are within the skill of the art. See Sambrook, Fritsch and Maniatis, MOLECULAR CLONING: A LABORATORY MANUAL, 2nd edition (1989); CURRENT PROTOCOLS IN MOLECULAR BIOLOGY (F. M. Ausubel, et al. eds., (1987)); the series METHODS IN ENZYMOLOGY (Academic Press, Inc.): PCR 2: A PRACTICAL APPROACH (M. J. MacPherson, B. D. Hames and G. R. Taylor eds. (1995)), Harlow and Lane, eds. (1988) ANTIBODIES, A LABORATORY MANUAL, and ANIMAL CELL CULTURE (R. I. Freshney, ed. (1987)).

[0053] Skin diseases and conditions may be characterized by abnormal loss of expression or underexpression of a particular protein or abnormal gain or overexpression of a particular protein. Such skin diseases or conditions can be treated by upregulation or down regulation of the particular protein. Accordingly, methods of treating a skin disease or condition are provided where delivery of nucleic acid sequences via recombinant viruses to skin cells results in up- or down-regulation of expression of the target nucleic acid. One of skill in the art will readily identify such diseases and conditions based on the present disclosure. Examples of target proteins/polynucleotides include a sequence associated with a signaling biochemical pathway, e.g., a signaling biochemical pathway-associated gene or polynucleotide. Examples of target polynucleotides include a disease associated gene or polynucleotide. A “disease-associated” gene or polynucleotide refers to any gene or polynucleotide which is yielding transcription or translation products at an abnormal level or in an abnormal form in cells derived from a disease-affected skin tissues compared with skin tissues or cells of a non disease control. It may be a gene that becomes expressed at an abnormally high level; it may be a gene that becomes expressed at an abnormally low level, where the altered expression correlates with the occurrence and/or progression of the disease. A disease-associated gene also refers to a gene possessing mutation(s) or genetic variation that is directly responsible or is in linkage disequilibrium with a gene(s) that is responsible for the etiology of a disease. The transcribed or translated products may be known or unknown, and may be at a normal or abnormal level. Examples of disease-associated genes and polynucleotides of skin are available from McKusick-Nathans Institute of Genetic Medicine, Johns Hopkins University (Baltimore, Md.) and National Center for Biotechnology Information, National Library of Medicine (Bethesda, Md.), available on the World Wide Web. Mutations in these genes and pathways can result in production of improper proteins or proteins in improper amounts which affect skin function. Such genes, proteins and pathways may be the target polynucleotide of the disclosed methods.

[0054] Embodiments of the present disclosure provide methods for delivering foreign or heterologous nucleic acids (i.e. those which are not part of a cell's natural nucleic acid composition) encoding genes of interest into a cell of the skin tissue. In one embodiment, the skin tissue is pre-treated with ultrasound prior to deliver of foreign or heterologous nucleic acids. Alternative methods for introducing foreign or heterologous nucleic acids into cells can be used in combination with the delivery methods disclosed herein. These alternative methods are known to those skilled in the art including transfection, transduction, viral transduction, microinjection, lipofection, nucleofection, nanoparticle bombardment, transformation, conjugation and the like. One of skill in the art will readily understand and adapt such methods using readily identifiable literature sources.

[0055] Embodiments of the present disclosure provide methods for delivering vectors encoding genes of interest into a cell of the skin tissue. The term “vector” includes a nucleic acid molecule capable of transporting another nucleic acid to which it has been linked. Vectors used to deliver the nucleic acids to cells as described herein include vectors known to those of skill in the art and used for such purposes. Certain exemplary vectors may be plasmids, lentiviruses or adeno-associated viruses known to those of skill in the art. Vectors include, but are not limited to, nucleic acid molecules that are single-stranded, doublestranded, or partially double-stranded; nucleic acid molecules that comprise one or more free ends, no free ends (e.g. circular); nucleic acid molecules that comprise DNA, RNA, or both; and other varieties of polynucleotides known in the art. One type of vector is a “plasmid,” which refers to a circular double stranded DNA loop into which additional DNA segments can be inserted, such as by standard molecular cloning techniques. Another type of vector is a viral vector, wherein virally-derived DNA or RNA sequences are present in the vector for packaging into a virus (e.g. retroviruses, lentiviruses, replication defective retroviruses, adenoviruses, replication defective adenoviruses, and adeno-associated viruses). Viral vectors also include polynucleotides carried by a virus for transfection into a host cell. Certain vectors are capable of autonomous replication in a host cell into which they are introduced (e.g. bacterial vectors having a bacterial origin of replication and episomal mammalian vectors). Other vectors (e.g., non-episomal mammalian vectors) are integrated into the genome of a host cell upon introduction into the host cell, and thereby are replicated along with the host genome. Moreover, certain vectors are capable of directing the expression of genes to which they are operatively linked. Such vectors are referred to herein as “expression vectors.” Common expression vectors of utility in recombinant DNA techniques are often in the form of plasmids. Recombinant expression vectors can comprise a nucleic acid of the invention in a form suitable for expression of the nucleic acid in a host cell, which means that the recombinant expression vectors include one or more regulatory elements, which may be selected on the basis of the host cells to be used for expression, that is operatively-linked to the nucleic acid sequence to be expressed. Within a recombinant expression vector, “operably linked” or “operatively linked” is intended to mean that the nucleotide sequence of interest is linked to the regulatory element(s) in a manner that allows for expression of the nucleotide sequence (e.g. in an in vitro transcription/translation system or in a host cell when the vector is introduced into the host cell). Vectors according to the present disclosure include those known in the art as being useful in delivering genetic material into a cell and would include regulators, promoters, nuclear localization signals (NLS), start codons, stop codons, a transgene etc., and any other genetic elements useful for integration and expression, as are known to those of skill in the art.

[0056] According to certain aspect, the present disclosure provides viral vectors for use in gene therapy methods disclosed herein and these viral vectors are usually generated by producing a cell line that packages a nucleic acid vector into a viral particle. The vectors typically contain the minimal viral sequences required for packaging and subsequent integration into a host, other viral sequences being replaced by an expression cassette for the polynucleotide(s) to be expressed. The missing viral functions are typically supplied in trans by the packaging cell line. For example, AAV vectors used in gene therapy typically only possess ITR sequences from the AAV genome which are required for packaging and integration into the host genome. Viral DNA is packaged in a cell line, which contains a helper plasmid encoding the other AAV genes, namely rep and cap, but lacking ITR sequences.

[0057] According to certain aspects, the present disclosure provides methods of non-viral delivery for use in gene therapy methods disclosed herein. Methods for non-viral delivery of nucleic acids or native DNA binding protein, native guide RNA or other native species include lipofection, microinjection, biolistics, virosomes, liposomes, immunoliposomes, polycation or lipid:nucleic acid conjugates, naked DNA, artificial virions, and agent-enhanced uptake of DNA. Lipofection is described in e.g., U.S. Pat. Nos. 5,049,386, 4,946,787; and 4,897,355) and lipofection reagents are sold commercially (e.g., Transfectam™ and Lipofectin™). Cationic and neutral lipids that are suitable for efficient receptor-recognition lipofection of polynucleotides include those of Felgner, WO 91/17424; WO 91/16024. Delivery can be to cells (e.g. in vitro or ex vivo administration) or target tissues (e.g. in vivo administration). The term native includes the protein, enzyme or guide RNA species itself and not the nucleic acid encoding the species.

[0058] According to some aspects, the present disclosure provides nucleic acid sequences encoding gene of interest including regulatory elements for optimum expression of the gene of interest in target cell or target tissue. The term “regulatory element” is intended to include promoters, enhancers, internal ribosomal entry sites (IRES), and other expression control elements (e.g. transcription termination signals, such as polyadenylation signals and poly-U sequences). Such regulatory elements are described, for example, in Goeddel, GENE EXPRESSION TECHNOLOGY: METHODS IN ENZYMOLOGY 185, Academic Press, San Diego, Calif. (1990). Regulatory elements include those that direct constitutive expression of a nucleotide sequence in many types of host cell and those that direct expression of the nucleotide sequence only in certain host cells (e.g., tissue-specific regulatory sequences). A tissue-specific promoter may direct expression primarily in a desired tissue of interest, such as muscle, neuron, bone, skin, blood, specific organs (e.g. liver, pancreas), or particular cell types (e.g. lymphocytes). Regulatory elements may also direct expression in a temporal-dependent manner, such as in a cell-cycle dependent or developmental stage-dependent manner, which may or may not also be tissue or cell-type specific. In some embodiments, a vector may comprise one or more pol III promoter (e.g. 1, 2, 3, 4, 5, or more pol III promoters), one or more pol II promoters (e.g. 1, 2, 3, 4, 5, or more pol II promoters), one or more pol I promoters (e.g. 1, 2, 3, 4, 5, or more pol I promoters), or combinations thereof. Examples of pol III promoters include, but are not limited to, U6 and H1 promoters. Examples of pol II promoters include, but are not limited to, the retroviral Rous sarcoma virus (RSV) LTR promoter (optionally with the RSV enhancer), the cytomegalovirus (CMV) promoter (optionally with the CMV enhancer) [see, e.g., Boshart et al, Cell, 41:521-530 (1985)], the SV40 promoter, the dihydrofolate reductase promoter, the 0-actin promoter, the phosphoglycerol kinase (PGK) promoter, and the EF1a promoter and Pol II promoters described herein. Also encompassed by the term “regulatory element” are enhancer elements, such as WPRE; CMV enhancers; the R-U5′ segment in LTR of HTLV-I (Mol. Cell. Biol., Vol. 8(1), p. 466-472, 1988); SV40 enhancer; and the intron sequence between exons 2 and 3 of rabbit β-globin (Proc. Natl. Acad. Sci. USA., Vol. 78(3), p. 1527-31, 1981). It will be appreciated by those skilled in the art that the design of the expression vector can depend on such factors as the choice of the host cell to be transformed, the level of expression desired, etc. A vector can be introduced into host cells to thereby produce transcripts, proteins, or peptides, including fusion proteins or peptides, encoded by nucleic acids as described herein (e.g., clustered regularly interspersed short palindromic repeats (CRISPR) transcripts, proteins, enzymes, mutant forms thereof, fusion proteins thereof, etc.).

[0059] Aspects of the methods described herein may make use of terminator sequences. A terminator sequence includes a section of nucleic acid sequence that marks the end of a gene or operon in genomic DNA during transcription. This sequence mediates transcriptional termination by providing signals in the newly synthesized mRNA that trigger processes which release the mRNA from the transcriptional complex. These processes include the direct interaction of the mRNA secondary structure with the complex and/or the indirect activities of recruited termination factors. Release of the transcriptional complex frees RNA polymerase and related transcriptional machinery to begin transcription of new mRNAs. Terminator sequences include those known in the art and identified and described herein.

[0060] Aspects of the methods described herein may make use of epitope tags and reporter gene sequences. Non-limiting examples of epitope tags include histidine (His) tags, V5 tags, FLAG tags, influenza hemagglutinin (HA) tags, Myc tags, VSV-G tags, and thioredoxin (Trx) tags. Examples of reporter genes include, but are not limited to, glutathione-S-transferase (GST), horseradish peroxidase (HRP), chloramphenicol acetyltransferase (CAT) beta-galactosidase, betaglucuronidase, luciferase, green fluorescent protein (GFP), HcRed, DsRed, cyan fluorescent protein (CFP), yellow fluorescent protein (YFP), and autofluorescent proteins including blue fluorescent protein (BFP).

[0061] The following examples are set forth as being representative of the present disclosure. These examples are not to be construed as limiting the scope of the present disclosure as these and other equivalent embodiments will be apparent in view of the present disclosure, figures and accompanying claims.

### Example I

### Materials and Methods

[0062] Recombinant AAV (rAVV) Vector A “recombinant parvoviral” or “AAV vector” or “rAAV vector” herein refers to a vector comprising one or more polynucleotide sequences of interest, genes of interest or “transgenes” that are flanked by at least one parvoviral or AAV inverted terminal repeat sequences (ITRs). Such rAAV vectors can be replicated and packaged into infectious viral particles when present in an insect host cell that is expressing AAV rep and cap gene products (i.e., AAV Rep and Cap proteins). When an rAAV vector is incorporated into a larger nucleic acid construct (e.g. in a chromosome or in another vector such as a plasmid or baculovirus used for cloning or transfection), then the rAAV vector is typically referred to as a “pro-vector” which can be “rescued” by replication and encapsidation in the presence of AAV packaging functions and necessary helper functions. Thus, in a further aspect the invention relates to a nucleic acid construct comprising a nucleotide sequence encoding a porphobilinogen deaminase as herein defined above, wherein the nucleic acid construct is a recombinant parvoviral or AAV vector and thus comprises at least one parvoviral or AAV ITR. Preferably, in the nucleic acid construct the nucleotide sequence encoding the porphobilinogen deaminase is flanked by parvoviral or AAV ITRs on either side.

[0063] The AAV VP proteins are known to determine the cellular tropicity of the AAV virion. The VP protein-encoding sequences are significantly less conserved than Rep proteins and genes among different AAV scrotypes. The ability of Rep and ITR sequences to cross-complement corresponding sequences of other serotypes allows for the production of pseudotyped rAAV particles comprising the capsid proteins of one serotype (e.g., AAV5) and the Rep and/or ITR sequences of another AAV serotype (e.g., AAV2). Such pseudotyped rAAV particles are a part of the present invention. Herein, a pseudotyped rAAV particle or hybrid rAAV may be referred to as being of the type “x/y”, where “x” indicates the source of ITRs and “y” indicates the serotype of capsid, for example a 2/5 rAAV particle has ITRs from AAV2 and a capsid from AAV5. Modified “AAV” sequences also can be used in the context of the present disclosure, e.g. for the production of rAAV vectors in insect cells. Such modified sequences e.g. include sequences having at least about 70%, at least about 75%, at least about 80%, at least about 85%, at least about 90%, at least about 95%, or more nucleotide and/or amino acid. sequence identity (e.g., a sequence having from about 75% to about 99% nucleotide sequence identity) to an AAV1, AAV2, AAV3, AAV4, AAV5, AAV6, AAV7, AAV8 or AAV9 ITR, Rep, or VP can be used in place of wild-type AAV ITR, Rep, or VP sequences. Preferred adenoviral vectors are modified to reduce the host response. See, e.g., Russell (2000) J. Gen. Virol. 81:2573-2604; US patent publication no. 20080008690; and Zaldumbide et al. (2008) Gene Therapy 15(4):239-46; all publications incorporated herein by reference.

### AAV Vector and Expression Cassette

[0064] The schematic of the backbone vector is as follows:

(SEQ ID NO: 32)
WPRE3_SV40 Late
polyA_ITR_florigin_AmpR_pBR322origin_ITR_shEf1a.
(SEQ ID NO: 33)
Forward primer 5′-ATGTTAGCGGCCGCGCCACCATGATGAGCTTT
GTGCAAAAGGGGAGC
and
(SEQ ID NO: 34)
reverse primer 5′-CTTACGGCTAGCTTATTATAAAAAGCAAACAG
GGCCAACGTCCAC

were used to amplify COL3A1 gene sequence. The bold and italicized part of the forward primer is the Kozak sequence. The bold and italicized part of the reverse primer is the stop codon sequence. The two parts were combined and used in PCR to amplify the COL3A1 sequence. The underlined sequences in both the forward and reverse primers are overhangs attached during PCR to create a fusion COL3A1 sequence for a total length of 3526 base pairs. After restriction digest using unique restriction enzyme site overhangs NotI and NheI, the backbone vector and gene were ligated together.

### AAV Production

[0065] The method of AAV production and titer quantification was carried out according to Lock, M. 2010 Human gene therapy; Kwon, O. et al., (2010) J Histochem Cytochem. 58(8):687-694. Briefly, Hek293 cells were triple co-transfected at 75% confluency in one 10 layer Nunc™ Cell Factory™ System from Thermo Scientific (Rockford, Ill.) using PEI transfection reagent following manufacturer's instructions. Cells and supernatant were harvested separately after 72 hours post transfection. The cells were spun down and lysed with 3 freeze-thaw cycles and incubated with Benzonase (E1015-25KU, Sigma). They were then clarified by spinning at 10,500×G for 20 min and the supernatant was added to the rest of the media supernatant. Everything was filtered through a 0.2 uM filter and was then concentrated using lab scale TFF system (EMD Chemicals, Gibbstown, N.J.) down to 15 ml. We used a Pellicon XL 100 kDa filter and followed manufactures instructions (EMD Chemicals, Gibbstown, N.J.). The concentrated prep was re-clarified by centrifugation at 10,500 Å˜g and 15° C. for 20 min and the supernatant was carefully removed to a new tube. Six iodixanol step gradients were formed according to the method of Zolotukhin and colleagues. See Zolotukhin S., (1999) Gene Ther. 6:973-85, with some modifications as follows: Increasingly dense iodixanol (OptiPrep; Sigma-Aldrich, St Louis, Mo.) solutions in phosphate-buffered saline (PBS) containing 10 mM magnesium chloride and 25 mM potassium were successively underlaid in 39 ml of 62 Quick-Seal centrifuge tubes (Beckman Instruments, Palo Alto, Calif.). The steps of the gradient were 4 ml of 15%, 9 ml of 25%, 9 ml of 40%, and 5 ml of 54% iodixanol. Fourteen milliliters of the clarified feedstock was then overlaid onto the gradient and the tube was sealed. The tubes were centrifuged for 70 min at 242,000 Å˜g in a VTi 50 rotor (Beckman Instruments) at 18° C. and the 40% gradient was collected through an 18-gauge needle inserted horizontally at the 54%/40% interface. The virus containing iodixanol was diafiltered using Amicon 15-Ultra and washed 5 times with final formulation buffer (PBS-35 mM NaCl), and concentrated to 1 ml.

### Vector Characterization

[0066] DNase I-resistant vector genomes were titered by TaqMan PCR amplification (AppliedBiosystems, Foster City, Calif.), using primers and probes directed against the WPRE3 poly Adenylation signal encoded in the transgene cassette. The purity of gradient fractions and final vector lots were evaluated by sodium dodecyl sulfate-polyacrylamide gel electrophoresis (SDS-PAGE) and the proteins were visualized by SYPRO ruby staining (Invitrogen) and UV excitation.

### Ultrasound Treatment and Delivery

[0067] Skin samples were mounted in custom diffusion chambers. Immediately before administration, the donor chamber was filled with 1.5 mL of phosphate buffered saline (PBS). 20 kHz ultrasound was utilized to maximize transient cavitation events, which have previously been shown to be the primary mechanism of enhancement. 20 kHz ultrasound was generated with a 12-element probe (probes 9 mm diameter) driven by a VCX 500 (Sonics and Materials, Inc., Newtown, Conn.). For all applications, the ultrasound probe tip was placed 3 mm away from the surface of the tissue. Ultrasound intensities were calibrated by calorimetry to 5 W/cm². Ultrasound was applied using a 50% duty cycle (5 s on, 5 s off). After administration, the PBS was removed. A solution (10 μl) of AAV was the applied topically on the skin and incubated at 32° C. for 60 minutes in the skin explant experiments, and 5 minutes in the hairless mice experiments. The effective dose range for small animals (mice), skin explants, and reconstructed human skin, following skin permeation by ultrasound, is between 5×10⁸ and 1×10¹² genome copy (gc)/cm². 5×10⁹ and 5×10¹⁰ were used for low and high dose, respectively.

### Image Processing Algorithm

[0068] The signal of EGFP in frozen samples from skin explants (16 mm×1 mm×20 μm) were analyzed and quantified using a custom MatLab scripts for image post-processing. The algorithm executes flat-field and background corrections and creates a logical mask of the image. Based on the different emission spectra of tissue auto-fluorescence and signal due to the expression of EGFP, the algorithm performs linear un-mixing of the total fluorescence intensity. Finally, it identified the areas of these unmixed signals of background autofluorescence and GFP signal.

### Histology and Immunofluorescence

[0069] Mouse or human skin was harvested and fixed in 10% formalin or 4% paraformaldehyde overnight for frozen sections, respectively. Frozen sections were used for Hematoxylin and Eosin (H&E) staining and histological analysis. H&E staining was carried out following the standard protocol (http://www.ihcworkd.com). Slides were mounted in Entellan New rapid mounting media (Electron Microscopy Sciences). Frozen sections (mounted in OCT embedding compound and frozen at −80 C) were used for immunofluorescence staining: primary antibodies were incubated for 3 hours, and second antibodies were incubated for 1 hour at room temperature in 5% BSA/PBST. Nuclei were stained with DAPI (Invitrogen), and the slides were mounted in Prolong Gold Antifade Mount (Invitrogen). Primary antibodies were used at 1:200 dilution, while secondary antibodies at 1:1000.

### Organ Cultures

[0070] Discarded human skin samples from abdominoplasty and/or breast reduction procedures were obtained from Massachusetts General Hospital (Boston, Mass.) under patients' agreement and institutional approval. Skin samples, sterilized in 70% ethanol and cut, after removal of subcutaneous fat, into 1.6 cm diameter pieces, were placed in keratinocyte serum-free medium (KSF, GIBCO-BRL) supplemented with epidermal growth factor (EGF) and bovine pituitary extract (BPE), in 0.25% agar (Sigma). The epidermis was maintained at the air-medium interface. For RNA and protein collection, skin samples were chilled (on ice) and homogenized using PRO200 BIO-GEN tissue homogenizer (Pro Scientific Inc., Oxford, Conn.).

### Western Blot

[0071] Protein from all tissues was isolated with RIPA (radioimmunoprecipitation assay) buffer containing protease and phosphatase inhibitors (all reagents purchased from Boston BioProducts, Ashland, Mass.). All specimens were chopped in small pieces and disrupted by PRO200 BIO-GEN tissue homogenizer (Pro Scientific Inc., Oxford, Conn.). Protein concentration in the clear lysates after centrifugation was measured with the Pierce BCA Protein Assay (Pierce Biotechnology, Grand Island, N.Y.). Western blots were quantified using the Fiji image processing software (open-source tool by ImageJ, https://imagej.nih.gov/ij/).

### RT-qPCR

[0072] One-step TaqMan (AppliedBiosystems, Foster City, Calif.) RT-qPCR were used with primers and probes directed against human COL3A1 encoded in the transgene cassette to perform quantification for gene expression. ACTB gene was used to quantify reference levels in the RNA samples. Equal amounts (as quantified by Agilent's bioanalyzer) of total RNA were used as input for all gene expression measurements.

### Tissue Harvest

[0073] Skin is immediately harvested after euthanasia. Part of it was snap frozen in dry ice for qPCR/qRT-PCR analysis and RNA/DNA-sequencing and the other part of each organ was then PFA-fixed for 3-24 hours depending on size and frozen in OCT buffer in liquid nitrogen bath for sectioning and analysis.

### Animal Euthanasia

[0074] Animals are euthanized by the slow fill method of CO₂ administration according to the equipment available in the facility. Typically, animals are euthanized in the home cage out of view from other animals. A regulator is used to ensure the proper flow rate. Animals should lose consciousness rapidly ˜30 sec. At the cessation of breathing (several minutes) animals will undergo a secondary physical method of euthanasia.

### Example II

### Efficacy of Gene Delivery

[0075] Most of the presently existing delivery methods for skin gene therapies rely on systemic delivery, electroporation or μ-needle injections. The delivery methods for skin gene therapy disclosed herein contemplate intra-dermal or topical delivery of recombinant viruses in a highly targeted and completely non-invasive manner. The ultrasound pre-treatment described herein is recognized to result in no pain or distress.

[0076] To determine delivery efficiency, the native fluorescence of a reporter gene distributed over a large surface area in full thickness human (breast) skin tissues cultured for 24 hours post-ultrasound treatment was studied. The reporter gene is enhanced GFP, and it is packaged in rAAV. The signal of EGFP in frozen samples (16 mm×1 mm×20 μm) was analyzed and quantified using a custom MatLab code for image post-processing. Briefly, the algorithm executes flat-field and background corrections and creates a logical mask of the image. Based on the different emission spectra of tissue auto-fluorescence and signal due to the expression of EGFP, the algorithm performs linear un-mixing of the total fluorescence intensity. Finally, it identified the areas of these unmixed signals. In FIG. 1, an example of this process was shown for one negative (no virus no ultrasound, NC), one negative ultrasound-treated (no virus, NC+US), and one positive controls (virus-EGFP+ultrasound, PC). In two donors of ages 30 and 52, signal intensities (of treated (virus-EGFP+ultrasound) and untreated (no virus, no ultrasound) skin explants) were reported in FIGS. 2A & 2C and percent transduced tissue areas were calculated and shown in FIGS. 2B & 2D for wild type rAAV2 with EGFP, and hybrid constructs encoding for the Rep gene from AAV2 and Cap gene derived from serotypes AAV1, AAV5, AAV6.2, AAV8, and AAV9 (AAV2/1, AAV2/5, AAV2/6.2, AAV8/2 and AAV9/2). Cell tropism of these hybrid viruses and wild-type AAV2 considerably differs in whole skin tissues and only certain viral capsids displayed successful transductions. It was shown that up to 2.1-fold enhancement in the expression of EGFP and 40-50% of infectivity in surface area (Between ultrasound treated vs. untreated across different hybrid viruses.)

[0077] Based on the results described in FIGS. 2A-2D, samples were selected that were infected with pRep2/Cap1: EGFP, wild-type AAV2 (pRep2/Cap2: EGFP), pRep2/Cap8: EGFP, and pRep2/Cap9: EGFP to further analyze using confocal imaging of immunofluorescent staining. The tissues were stained with Vimentin (a fibroblast marker), anti-EGFP (a marker for the reporter gene), and Cytokeratin 19 (a marker for epithelial progenitors) (FIGS. 3A-3E). The findings are qualitatively summarized in Table 2 below.

TABLE 2
Qualitative cell tropism in human ex vivo experiments.

| | pRep2/Cap1 | pRep2/Cap2 | pRep2/Cap8 | pRep2/Cap9 |
|---|---|---|---|---|
| Skin feature | (AAV2/1) | (AAV2/2) | (AAV2/8) | (AAV2/9) |
| Keratinocytes | Moderate | Strong | Weak | Weak |
| Stem cells | Strong | Strong | Strong | Strong |
| (epithelial) | | | | |
| Fibroblasts | Moderate | Strong | Weak | Weak |
| Sebaceous | Strong | Strong | Strong | Strong |
| glands | | | | |
| Hair follicles | Strong | Strong | Strong | Moderate |

[0078] Because wild type AAV2 shows best gene delivery across all skin major cell types, rAAV2/2 was adopted to perform another set of tests in human skin explants (ex vivo) taken from the forehead skin of a 60-year-old donor. For cell tropism analysis, these tissues were stained for Vimentin (a fibroblast marker), anti-EGFP (a marker for the reporter gene), and Keratin 15 (a marker for epithelial stem cells) (FIGS. 4A-4D). Successful gene transfer was observed to all cells positive for Keratin 15—an epithelial stem cell marker against proliferating progenitors residing in the basement membrane of the dermal epidermal junction, hair follicles, and their niche (red and white overlapping signal in FIGS. 4C and 4D).

### Gene and Protein Modulation

[0079] Next, to determine prolonged gene expression and stable protein modulation in vivo, hairless mice model was used. For these proof-of-concept experiments, we chose to deliver a single precursor gene to human collagen III (alpha domain), packaged in rAAV2 (rAAV2/2: COL3A1). Type III collagen is a human gene which encodes for collagen III fibrils which serve as a major component of the skin extracellular matrix, thus being an important target for the purposes of rebuilding aged- and diseased-skin dermis. Protein analysis and quantification using Western blot showed up to 5.4-fold over expression of collagen III, levels comparable to those in human skin (FIGS. 5A-5F). Type III collagen is primarily produced by dermal fibroblast cells. Collagen III is an attractive target for proof of principle experiments because hairless mice don't have this collagen type, which allows for zero-background detection of overexpression that is well-detectable by a human-specific antibody assay. We here compare the amounts of produced protein from overexpression of COL3A1 in hairless mice to the native amounts of protein encoded by COL3A1 in human skin. As a reference control, we used a tissue lysate prepared from a skin explant of an 18-year old individual.

[0080] Similar to the in vivo mouse experiments, gene and protein modulation of collagen III was determined in vitro in human artificial skin (EpiDermFT tissues commercially made available by MatTek, Inc.). These artificial skin tissues contain primary human dermal fibroblasts and epidermal keratinocytes that are cultured to form a full thickness multilayer model of human skin. The tissue layers are metabolically and mitotically active and mimic in vivo characteristics. We delivered viral vectors of rAAV2/2: EGFP and rAAV2/2: COL3A1, and measured 40,000-fold and 2.8-fold increase in the gene expression of EGFP and COL3A1 via RT-qPCR. The reported gene expression fold increase is relative to untreated (no-AAV, no ultrasound) control samples. All gene expression levels are normalized to the expression of ACTB. Measured by Western blotting, collagen levels showed 2.3-fold enhancement relative to untreated negative control tissue. As another end-point, we confirmed collagen accumulation by histological analysis using Picro-sirius red and trichrome staining which quantify total collagen content (FIGS. 6A-6G).

| Nucleic Acid Sequences | |
|---|---|
| 1. COL1A1 chimeric DNA, Collagen Type I Alpha 1 Chain | |
| (SEQ ID NO: 1) | |
| 1 | cccacgcgtc cggactagtt ctagatcgcg agcggcccgg agttggggcg ccttgccccg |
| 61 | ggccccccag catgaagacc ccggcggaca cagggtttgc cttcccagat tgggcctaca |
| 121 | aaccggagtc atcccctggc tccaggcaga tccagctgtg gcactttatc ctggagctgc |
| 181 | ttcggaaaga ggagtaccag ggcgtcatcg cttggcaggg ggactacggg gagtttgtca |
| 241 | tcaaggaccc tggtgaacct ggcgagcctg gcggttcagg tccaatgggt ccccgaggtc |
| 301 | cccctggccc tcctggcaag aatggagatg atggggaagc tggcaagccc ggccgtcctg |
| 361 | gtgagcgtgg acctcctgga cctcagggtg ctcgtggatt gcctggaaca gctggcctcc |
| 421 | ctggaatgaa gggacaccga ggcttcagtg gtttggatgg tgccaaagga gatgctggtc |
| 481 | ctgctggtcc taagggagag cccggcagtc ctggtgaaaa cggagctcct ggccagatgg |
| 541 | gtccccgagg tctgcccggt gagagaggtc gccctggacc tcctggcact gctggtgctc |
| 601 | gcggtaacga tggtgctgtt ggtgctgctg gaccccctgg tcccaccggc cccactggcc |
| 661 | ctcctggctt ccctggtgca gttggtgcta agggtgaagc tggtccccaa ggagctagag |
| 721 | gctctgaagg tccccagggt gtgcgtggtg agcccggacc ccctggccct gctggtgctg |
| 781 | ccggccctgc tggaaaccct ggtgctgatg gacaacctgg cgctaaaggt gccaatggtg |
| 841 | ctcctggtat tgctggtgct cctggcttcc ctggtgcccg aggcccctct ggaccccagg |
| 901 | gccccagcgg ccctccaggt cccaagggta acagtggtga acctggtgct cctggcaaca |
| 961 | aaggagacac tggtgccaaa ggagaacccg gtgctactgg agttcaaggt cccccaggcc |
| 1021 | ctgccggaga agaaggaaaa cgaggagccc gtggtgagcc tggaccttcc ggactgcctg |
| 1081 | gacctcctgg cgagcgtggt ggacctggta gccgtggttt ccctggtgct gatggtgttg |
| 1141 | ctggccccaa gggtccttcc ggtgaacgtg gtgctcccgg acctgctggt cccaaaggtt |
| 1201 | ctcctggtga agctggtcgc cccggtgaag ctggtctccc tggtgccaag ggtctcactg |
| 1261 | gcagtcctgg cagccctggt cctgatggca aaaccggccc ccctggtccc gctggtcaag |
| 1321 | atggtcgccc tggacccgca ggtcctcctg gagcccgtgg ccaggctggt gtgatgggat |
| 1381 | tccctggacc taagggtacc gctggagaac ctggaaaggc tggagagcga ggccttcccg |
| 1441 | gaccccctgg cgctgttggt cctgctggca aagatggaga agctggagct cagggagccc |
| 1501 | ctggccctgc tggtcctgct ggtgagagag gtgaacaagg tcccgctggc tcccctggat |
| 1561 | tccagggtct tcctggtcct gccggtcctc ctggtgaagc aggcaagcct ggtgaacagg |
| 1621 | gtgttcctgg agaccttggt gcccctggac cctctggcgc aagaggcgag agaggtttcc |
| 1681 | ctggtgaacg tggtgtacaa ggtcccccag gtcctgctgg tccccgagga aacaatggtg |
| 1741 | cccccggcaa cgatggtgcc aagggtgata ctggtgcccc cggagctccc ggtagccagg |
| 1801 | gtgcccccgg tcttcaggga atgcctggtg aacgtggtgc agctggtctt ccaggtccta |
| 1861 | agggtgacag aggtgatgct ggtcccaaag gtgctgatgg ttctcctggt aaagatggtg |
| 1921 | cccgtggtct gactggtccc attggtcctc ctggccctgc tggtgcccct ggtgacaagg |
| 1981 | gtgaagctgg tcccagtggt cctcccggtc ccaccggagc ccgtggtgct cccggagacc |
| 2041 | gtggtgaggc tggtccccct ggtcctgctg gctttgccgg cccccctggt gctgatggcc |
| 2101 | aacctggtgc gaaaggtgaa cctggtgata ctggtgttaa aggtgatgct ggtcctcctg |
| 2161 | gccctgctgg tcctgctgga ccccccggcc ccattggtaa cgttggtgct cctggaccca |
| 2221 | aaggtcctcg tggtgctgct ggtccccctg gtgctactgg cttccctggt gctgctggcc |
| 2281 | gtgtcggtcc ccctggtccc tctggaaatg ctggaccccc tggccctccc ggtcccgttg |
| 2341 | gcaaagaagg gggcaaaggt ccccgtggtg agactggccc tgctggacgt cctggtgaag |
| 2401 | ttggtccccc aggtcccccc ggtcctgctg gtgagaaagg atctcctggt gctgatggac |
| 2461 | ctgctggctc tcctggtacc cctggacctc agggtattgc tggacaacgt ggtgtggtcg |
| 2521 | gtcttcccgg tcagagagga gaaagaggct tccctggtct tcctggcccc tctggtgaac |
| 2581 | ctggcaaaca aggtccttct ggatcaagtg gtgaacgcgg tccccctggc cccatggggc |
| 2641 | cccctggatt ggctggtccc cctggtgaat ctggacgtga gggatcccct ggtgctgaag |
| 2701 | gctcccctgg aagggatggt gctcccgggg ccaagggtga ccgtggtgag actggccctg |
| 2761 | ctggcccccc tggtgcccct ggtgctcccg gtgctcccgg ccctgttggt cccgctggca |
| 2821 | agaatggcga tcgtggtgag actggtcctg ctggtcctgc tggtcccatt ggccctgctg |
| 2881 | gtgcccgtgg ccctgctgga ccccaaggcc cccgtggtga caagggtgag acaggcgaac |
| 2941 | aaggtgacag aggcataaag ggtcatcgtg gcttctctgg tctccagggt cctcctggtt |
| 3001 | ctcctggttc tcctggtgaa caaggcccct ctggagcttc aggtcctgca ggcccccggg |
| 3061 | gtccccctgg ctctgctggt tctcctggca aagacggact caacggtctc cctggcccca |
| 3121 | ttggtccccc tggtcctcga ggtcgcactg gtgacagcgg ccctgctggt ccccccggcc |
| 3181 | ctcctggacc ccctggccct cctggacctc ccagtggcgg ttatgacttc agcttcctgc |
| 3241 | ctcagccacc tcaagagaag tctcaagatg gtggccgcta ctaccgggcc gatgatgcta |
| 3301 | acgtggttcg tgaccgtgac cttgaggtgg acaccaccct caagagcctg agtcagcaga |
| 3361 | ttgagaacat ccgcagcccc gaaggcagcc gcaagaaccc tgcccgcaca tgccgcgacc |
| 3421 | tcaagatgtg ccactctgac tggaagagcg gagagtactg gatcgaccct aaccaaggct |
| 3481 | gcaacctgga cgccatcaag gtctactgca acatggagac aggtcagacc tgtgtgttcc |
| 3541 | ctactcagcc gtctgtgcct cagaagaact ggtacatcag cccgaacccc aaggaaaaga |
| 3601 | agcacgtctg gtttggagag agcatgaccg atggattccc gttcgagtac ggaagcgagg |
| 3661 | gctccgaccc cgccgatgtc gctatccagc tgaccttcct gcgcctaatg tccaccgagg |
| 3721 | cctcccagaa catcacctat cactgcaaga acagcgtagc ctacatggac cagcagactg |
| 3781 | gcaacctcaa gaaggccctg ctcctccagg gatccaacga gatcgagctc agaggcgaag |
| 3841 | gcaacagtcg cttcacctac agcacccttg tggacggctg cacgagtcac accggaactt |
| 3901 | ggggcaagac agtcatcgaa tacaaaacca ccaagacctc ccgcctgccc atcatcgatg |
| 3961 | tggctccctt ggacattggt gccccagacc aggaattcgg actagacatt ggccctgcct |
| 4021 | gcttcgtgta aactccctcc accccaatct ggttccctcc cacccagccc acttttcccc |
| 4081 | aaccctggaa acagacgaac aacccaaact caatttcccc caaaagccaa aaatatggga |
| 4141 | gataatttca catggacttt ggaaaacatt ttttttcctt tgcattcacc tttcaaactt |
| 4201 | agtttttacc tttgaccaac tgaacgtgac caaaaaccaa aagtgcattc aaccttacca |
| 4261 | aaaaagaaaa aaaaaaaaga ataaataaat aactttttaa aaaaggaaaa aaaaaaaaaa |
| 4321 | a |
| 2. COL3A1 human DNA, Collagen Type III Alpha 1 Chain | |
| (SEQ ID NO: 2) | |
| 1 | ccacgcgtcc ggacgggccc ggtgctgaag ggcagggaac aacttgatgg tgctactttg |
| 61 | aactgctttt cttttctcct ttttgcacaa agagtctcat gtctgatatt tagacatgat |
| 121 | gagctttgtg caaaagggga gctggctact tctcgctctg cttcatccca ctattatttt |
| 181 | ggcacaacag gaagctgttg aaggaggatg ttcccatctt ggtcagtcct atgcggatag |
| 241 | agatgtctgg aagccagaac catgccaaat atgtgtctgt gactcaggat ccgttctctg |
| 301 | cgatgacata atatgtgacg atcaagaatt agactgcccc aacccagaaa ttccatttgg |
| 361 | agaatgttgt gcagtttgcc cacagcctcc aactgctcct actcgccctc ctaatggtca |
| 421 | aggacctcaa ggccccaagg gagatccagg ccctcctggt attcctggga gaaatggtga |
| 481 | ccctggtatt ccaggacaac cagggtcccc tggttctcct ggcccccctg gaatctgtga |
| 541 | atcatgccct actggtcctc agaactattc tccccagtat gattcatatg atgtcaagtc |
| 601 | tggagtagca gtaggaggac tcgcaggcta tcctggacca gctggccccc caggccctcc |
| 661 | cggtccccct ggtacatctg gtcatcctgg ttcccctgga tctccaggat accaaggacc |
| 721 | ccctggtgaa cctgggcaag ctggtccttc aggccctcca ggacctcctg gtgctatagg |
| 781 | tccatctggt cctgctggaa aagatggaga atcaggtaga cccggacgac ctggagagcg |
| 841 | aggattgcct ggacctccag gtatcaaagg tccagctggg atacctggat tccctggtat |
| 901 | gaaaggacac agaggcttcg atggacgaaa tggagaaaag ggtgaaacag gtgctcctgg |
| 961 | attaaagggt gaaaatggtc ttccaggcga aaatggagct cctggaccca tgggtccaag |
| 1021 | aggggctcct ggtgagcgag gacggccagg acttcctggg gctgcaggtg ctcggggtaa |
| 1081 | tgacggtgct cgaggcagtg atggtcaacc aggccctcct ggtcctcctg gaactgccgg |
| 1141 | attccctgga tcccctggtg ctaagggtga agttggacct gcagggtctc ctggttcaaa |
| 1201 | tggtgcccct ggacaaagag gagaacctgg acctcaggga cacgctggtg ctcaaggtcc |
| 1261 | tcctggccct cctgggatta atggtagtcc tggtggtaaa ggcgaaatgg gtcccgctgg |
| 1321 | cattcctgga gctcctggac tgatgggagc ccggggtcct ccaggaccag ccggtgctaa |
| 1381 | tggtgctcct ggactgcgag gtggtgcagg tgagcctggt aagaatggtg ccaaaggaga |
| 1441 | gcccggacca cgtggtgaac gcggtgaggc tggtattcca ggtgttccag gagctaaagg |
| 1501 | cgaagatggc aaggatggat cacctggaga acctggtgca aatgggcttc caggagctgc |
| 1561 | aggagaaagg ggtgcccctg ggttccgagg acctgctgga ccaaatggca tcccaggaga |
| 1621 | aaagggtcct gctggagagc gtggtgctcc aggccctgca gggcccagag gagctgctgg |
| 1681 | agaacctggc agagatggcg tccctggagg tccaggaatg aggggcatgc ccggaagtcc |
| 1741 | aggaggacca ggaagtgatg ggaaaccagg gcctcccgga agtcaaggag aaagtggtcg |
| 1801 | accaggtcct cctgggccat ctggtccccg aggtcagcct ggtgtcatgg gcttccccgg |
| 1861 | tcctaaagga aatgatggtg ctcctggtaa gaatggagaa cgaggtggcc ctggaggacc |
| 1921 | tggccctcag ggtcctcctg gaaagaatgg tgaaactgga cctcagggac ccccagggcc |
| 1981 | tactgggcct ggtggtgaca aaggagacac aggaccccct ggtccacaag gattacaagg |
| 2041 | cttgcctggt acaggtggtc ctccaggaga aaatggaaaa cctggggaac caggtccaaa |
| 2101 | gggtgatgcc ggtgcacctg gagctccagg aggcaagggt gatgctggtg cccctggtga |
| 2161 | acgtggacct cctggattgg caggggcccc aggacttaga ggtggagctg gtccccctgg |
| 2221 | tcccgaagga ggaaagggtg ctgctggtcc tcctgggcca cctggtgctg ctggtactcc |
| 2281 | tggtctgcaa ggaatgcctg gagaaagagg aggtcttgga agtcctggtc caaagggtga |
| 2341 | caagggtgaa ccaggcggtc caggtgctga tggtgtccca gggaaagatg gcccaagggg |
| 2401 | tcctactggt cctattggtc ctcctggccc agctggccag cctggagata agggtgaagg |
| 2461 | tggtgccccc ggacttccag gtatagctgg acctcgtggt agccctggtg agagaggtga |
| 2521 | aactggccct ccaggacctg ctggtttccc tggtgctcct ggacagaatg gtgaacctgg |
| 2581 | tggtaaagga gaaagagggg ctccgggtga gaaaggtgaa ggaggccctc ctggagttgc |
| 2641 | aggacctcct ggcaaagatg gaaccagtgg acatccaggt cccattggac caccagggcc |
| 2701 | tcgaggtaac agaggtgaaa gaggatctga gggctcccca ggccacccag ggcaaccagg |
| 2761 | ccctcctgga cctcctggtg cccctggtcc ttgctgtggt ggtgttggag ccgctgccat |
| 2821 | tgctgggatt ggaggtgaaa aagctggcgg ttttgccccg tattatggag atgaaccaat |
| 2881 | ggatttcaaa atcaacaccg atgagattat gacttcactc aagtctgtta atggacaaat |
| 2941 | agaaagcctc attagtcctg atggttctcg taaaaacccc gctagaaact gcagagacct |
| 3001 | gaaattctgc catcctgaac tcaagagtgg agaatactgg gttgacccta accaaggatg |
| 3061 | caaattggat gctatcaagg tattctgtaa tatggaaact ggggaaacat gcataagtgc |
| 3121 | caatcctttg aatgttccac ggaaacactg gtggacagat tctagtgctg agaagaaaca |
| 3181 | cgtttggttt ggagagtcca tggatggtgg ttttcagttt agctacggca atcctgaact |
| 3241 | tcctgaagat gtccttgatg tgcagctggc attccttcga cttctctcca gccgagcttc |
| 3301 | ccagaacatc acatatcact gcaaaaatag cattgcatac atggatcagg ccagtggaaa |
| 3361 | tgtaaagaag gccctgaagc tgatggggtc aaatgaaggt gaattcaagg ctgaaggaaa |
| 3421 | tagcaaattc acctacacag ttctggagga tggttgcacg aaacacactg gggaatggag |
| 3481 | caaaacagtc tttgaatatc gaacacgcaa ggctgtgaga ctacctattg tagatattgc |
| 3541 | accctatgac attggtggtc ctgatcaaga atttggtgtg gacgttggcc ctgtttgctt |
| 3601 | tttataaacc aaactctatc tgaaatccca acaaaaaaaa tttaactcca tatgtgttcc |
| 3661 | tcttgttcta atcttgtcaa ccagtgcaag tgaccgacaa aattccagtt atttatttcc |
| 3721 | aaaatgtttg gaaacagtat aatttgacaa agaaaaatga tacttctctt tttttgctgt |
| 3781 | tccaccaaat acaattcaaa tgctttttgt tttatttttt taccaattcc aatttcaaaa |
| 3841 | tgtctcaatg gtgctataat aaataaactt caacactctt tatgataaaa aaaaaaaaaa |
| 3901 | aa |
| 3. TIMP1 human DNA, TIMP Metallopeptidase Inhibitor 1 | |
| (SEQ ID NO: 3) | |
| 1 | gtaatgcatc caggaagcct ggaggcctgt ggtttccgca cccgctgcca cccccgcccc |
| 61 | tagcgtggac atttatcctc tagcgctcag gccctgccgc catcgccgca gatccagcgc |
| 121 | ccagagagac accagagaac ccaccatggc cccctttgag cccctggctt ctggcatcct |
| 181 | gttgttgctg tggctgatag cccccagcag ggcctgcacc tgtgtcccac cccacccaca |
| 241 | gacggccttc tgcaattccg acctcgtcat cagggccaag ttcgtgggga caccagaagt |
| 301 | caaccagacc accttatacc agcgttatga gatcaagatg accaagatgt ataaagggtt |
| 361 | ccaagcctta ggggatgccg ctgacatccg gttcgtctac acccccgcca tggagagtgt |
| 421 | ctgcggatac ttccacaggt cccacaaccg cagcgaggag tttctcattg ctggaaaact |
| 481 | gcaggatgga ctcttgcaca tcactacctg cagtttcgtg gctccctgga acagcctgag |
| 541 | cttagctcag cgccggggct tcaccaagac ctacactgtt ggctgtgagg aatgcacagt |
| 601 | gtttccctgt ttatccatcc cctgcaaact gcagagtggc actcattgct tgtggacgga |
| 661 | ccagctcctc caaggctctg aaaagggctt ccagtcccgt caccttgcct gcctgcctcg |
| 721 | ggagccaggg ctgtgcacct ggcagtccct gcggtcccag atagcctgaa tcctgcccgg |
| 781 | agtggaagct gaagcctgca cagtgtccac cctgttccca ctcccatctt tcttccggac |
| 841 | aatgaaataa agagttacca cccagcaaaa aaaaaaaaaa a |
| 4. TIMP2 human DNA, TIMP Metallopeptidase Inhibitor 2 | |
| (SEQ ID NO: 4) | |
| 1 | agcaaacaca tccgtagaag gcagcgcggc cgccgagagc cgcagcgccg ctcgcccgcc |
| 61 | gccccccacc ccgccgcccc gcccggcgaa ttgcgccccg cgcccctccc ctcgcgcccc |
| 121 | cgagacaaag aggagagaaa gtttgcgcgg ccgagcgggg caggtgagga gggtgagccg |
| 181 | cgcgggaggg gcccgcctcg gccccggctc agcccccgcc cgcgccccca gcccgccgcc |
| 241 | gcgagcagcg cccggacccc ccagcggcgg cccccgcccg cccagccccc cggcccgcca |
| 301 | tgggcgccgc ggcccgcacc ctgcggctgg cgctcggcct cctgctgctg gcgacgctgc |
| 361 | ttcgcccggc cgacgcctgc agctgctccc cggtgcaccc gcaacaggcg ttttgcaatg |
| 421 | cagatgtagt gatcagggcc aaagcggtca gtgagaagga agtggactct ggaaacgaca |
| 481 | tttatggcaa ccctatcaag aggatccagt atgagatcaa gcagataaag atgttcaaag |
| 541 | ggcctgagaa ggatatagag tttatctaca cggccccctc ctcggcagtg tgtggggtct |
| 601 | cgctggacgt tggaggaaag aaggaatatc tcattgcagg aaaggccgag ggggacggca |
| 661 | agatgcacat caccctctgt gacttcatcg tgccctggga caccctgagc accacccaga |
| 721 | agaagagcct gaaccacagg taccagatgg gctgcgagtg caagatcacg cgctgcccca |
| 781 | tgatcccgtg ctacatctcc tccccggacg agtgcctctg gatggactgg gtcacagaga |
| 841 | agaacatcaa cgggcaccag gccaagttct tcgcctgcat caagagaagt gacggctcct |
| 901 | gtgcgtggta ccgcggcgcg gcgcccccca agcaggagtt tctcgacatc gaggacccat |
| 961 | aagcaggcct ccaacgcccc tgtggccaac tgcaaaaaaa gcctccaagg gtttcgactg |
| 1021 | gtccagctct gacatccctt cctggaaaca gcatgaataa aacactcatc ccatgggtcc |
| 1081 | aaattaatat gattctgctc cccccttctc cttttagaca tggttgtggg tctggaggga |
| 1141 | gacgtgggtc caaggtcctc atcccatcct ccctctgcca ggcactatgt gtctggggct |
| 1201 | tcgatccttg ggtgcaggca gggctgggac acgcggcttc cctcccagtc cctgccttgg |
| 1261 | caccgtcaca gatgccaagc aggcagcact tagggatctc ccagctgggt tagggcaggg |
| 1321 | cctggaaatg tgcattttgc agaaactttt gagggtcgtt gcaagactgt gtagcaggcc |
| 1381 | taccaggtcc ctttcatctt gagagggaca tggcccttgt tttctgcagc ttccacgcct |
| 1441 | ctgcactccc tgcccctggc aagtgctccc atcgccccgg tgcccaccat gagctcccag |
| 1501 | cacctgactc cccccacatc caagggcagc ctggaaccag tggctagttc ttgaaggagc |
| 1561 | cccatcaatc ctattaatcc tcagaattcc agtgggagcc tccctctgag ccttgtagaa |
| 1621 | atgggagcga gaaaccccag ctgagctgcg ttccagcctc agctgagtct ttttggtctg |
| 1681 | cacccacccc cccacccccc ccccgcccac atgctcccca gcttgcagga ggaatcggtg |
| 1741 | aggtcctgtc ctgaggctgc tgtccggggc cggtggctgc cctcaaggtc ccttccctag |
| 1801 | ctgctgcggt tgccattgct tcttgcctgt tctggcatca ggcacctgga ttgagttgca |
| 1861 | cagctttgct ttatccgggc ttgtgtgcag ggcccggctg ggctccccat ctgcacatcc |
| 1921 | tgaggacaga aaaagctggg tcttgctgtg ccctcccagg cttagtgttc cctccctcaa |
| 1981 | agactgacag ccatcgttct gcacggggtt ttctgcatgt gacgccagct aagcatagta |
| 2041 | agaagtccag cctaggaagg gaaggatttt ggaggtaggt ggctttggtg acacactcac |
| 2101 | ttctttctca gcctccagga cactatggcc tgttttaaga gacatcttat ttttctaaag |
| 2161 | gtgaattctc agatgatagg tgaacctgag ttgcagatat accaacttct gcttgtattt |
| 2221 | cttaaatgac aaagattacc tagctaagaa acttcctagg gaactaggga acctatgtgt |
| 2281 | tccctcagtg tggtttcctg aagccagtga tatgggggtt aggataggaa gaactttctc |
| 2341 | ggtaatgata aggagaatct cttgtttcct cccacctgtg ttgtaaagat aaactgacga |
| 2401 | tatacaggca cattatgtaa acatacacac gcaatgaaac cgaagcttgg cggcctgggc |
| 2461 | gtggtcttgc aaaatgcttc caaagccacc ttagcctgtt ctattcagcg gcaaccccaa |
| 2521 | agcacctgtt aagactcctg acccccaagt ggcatgcagc ccccatgccc accgggacct |
| 2581 | ggtcagcaca gatcttgatg acttcccttt ctagggcaga ctgggagggt atccaggaat |
| 2641 | cggcccctgc cccacgggcg ttttcatgct gtacagtgac ctaaagttgg taagatgtca |
| 2701 | taatggacca gtccatgtga tttcagtata tacaactcca ccagacccct ccaacccata |
| 2761 | taacacccca cccctgttcg cttcctgtat ggtgatatca tatgtaacat ttactcctgt |
| 2821 | ttctgctgat tgttttttta atgttttggt ttgtttttga catcagctgt aatcattcct |
| 2881 | gtgctgtgtt ttttattacc cttggtaggt attagacttg cactttttta aaaaaaggtt |
| 2941 | tctgcatcgt ggaagcattt gacccagagt ggaacgcgtg gcctatgcag gtggattcct |
| 3001 | tcaggtcttt cctttggttc tttgagcatc tttgctttca ttcgtctccc gtctttggtt |
| 3061 | ctccagttca aattattgca aagtaaagga tctttgagta ggttcggtct gaaaggtgtg |
| 3121 | gcctttatat ttgatccaca cacgttggtc ttttaaccgt gctgagcaga aaacaaaaca |
| 3181 | ggttaagaag agccgggtgg cagctgacag aggaagccgc tcaaatacct tcacaataaa |
| 3241 | tagtggcaat atatatatag tttaagaagg ctctccattt ggcatcgttt aatttatatg |
| 3301 | ttatgttcta agcacagctc tcttctccta ttttcatcct gcaagcaact caaaatattt |
| 3361 | aaaataaagt ttacattgta gttattttca aatctttgct tgataagtat taagaaatat |
| 3421 | tggacttgct gccgtaattt aaagctctgt tgattttgtt tccgtttgga tttttggggg |
| 3481 | aggggagcac tgtgtttatg ctggaatatg aagtctgaga ccttccggtg ctgggaacac |
| 3541 | acaagagttg ttgaaagttg acaagcagac tgcgcatgtc tctgatgctt tgtatcattc |
| 3601 | ttgagcaatc gctcggtccg tggacaataa acagtattat caaagagaaa aaaaaaaaaa |
| 3661 | a |
| 5. SMAD2 human DNA, SMAD Family Member 2 | |
| (SEQ ID NO: 5) | |
| 1 | gcgcccgggc cgccggccgg gcccgggcct gggggcgggg cgggaagacg gcggccggga |
| 61 | gtgttttcag ttccgcctcc aatcgcccat tcccctcttc ccctcccagc cccctccatc |
| 121 | ccatcggaag aggaaggaac aaaaggtccc ggaccccccg gatctgacgg ggcgggacct |
| 181 | ggcgccacct tgcaggttcg atacaagagg ctgttttcct agcgtggctt gctgcctttg |
| 241 | gtaagaacat gtcgtccatc ttgccattca cgccgccagt tgtgaagaga ctgctgggat |
| 301 | ggaagaagtc agctggtggg tctggaggag caggcggagg agagcagaat gggcaggaag |
| 361 | aaaagtggtg tgagaaagca gtgaaaagtc tggtgaagaa gctaaagaaa acaggacgat |
| 421 | tagatgagct tgagaaagcc atcaccactc aaaactgtaa tactaaatgt gttaccatac |
| 481 | caagcacttg ctctgaaatt tggggactga gtacaccaaa tacgatagat cagtgggata |
| 541 | caacaggcct ttacagcttc tctgaacaaa ccaggtctct tgatggtcgt ctccaggtat |
| 601 | cccatcgaaa aggattgcca catgttatat attgccgatt atggcgctgg cctgatcttc |
| 661 | acagtcatca tgaactcaag gcaattgaaa actgcgaata tgcttttaat cttaaaaagg |
| 721 | atgaagtatg tgtaaaccct taccactatc agagagttga gacaccagtt ttgcctccag |
| 781 | tattagtgcc ccgacacacc gagatcctaa cagaacttcc gcctctggat gactatactc |
| 841 | actccattcc agaaaacact aacttcccag caggaattga gccacagagt aattatattc |
| 901 | cagaaacgcc acctcctgga tatatcagtg aagatggaga aacaagtgac caacagttga |
| 961 | atcaaagtat ggacacaggc tctccagcag aactatctcc tactactctt tcccctgtta |
| 1021 | atcatagctt ggatttacag ccagttactt actcagaacc tgcattttgg tgttcgatag |
| 1081 | catattatga attaaatcag agggttggag aaaccttcca tgcatcacag ccctcactca |
| 1141 | ctgtagatgg ctttacagac ccatcaaatt cagagaggtt ctgcttaggt ttactctcca |
| 1201 | atgttaaccg aaatgccacg gtagaaatga caagaaggca tataggaaga ggagtgcgct |
| 1261 | tatactacat aggtggggaa gtttttgctg agtgcctaag tgatagtgca atctttgtgc |
| 1321 | agagccccaa ttgtaatcag agatatggct ggcaccctgc aacagtgtgt aaaattccac |
| 1381 | caggctgtaa tctgaagatc ttcaacaacc aggaatttgc tgctcttctg gctcagtctg |
| 1441 | ttaatcaggg ttttgaagcc gtctatcagc taactagaat gtgcaccata agaatgagtt |
| 1501 | ttgtgaaagg gtggggagca gaataccgaa ggcagacggt aacaagtact ccttgctgga |
| 1561 | ttgaacttca tctgaatgga cctctacagt ggttggacaa agtattaact cagatgggat |
| 1621 | ccccttcagt gcgttgctca agcatgtcat aaagcttcac caatcaagtc ccatgaaaag |
| 1681 | acttaatgta acaactcttc tgtcatagca ttgtgtgtgg tccctatgga ctgtttacta |
| 1741 | tccaaaagtt caagagagaa aacagcactt gaggtctcat caattaaagc accttgtgga |
| 1801 | atctgtttcc tatatttgaa tattagatgg gaaaattagt gtctagaaat actctcccat |
| 1861 | taaagaggaa gagaagattt taaagactta atgatgtctt attgggcata aaactgagtg |
| 1921 | tcccaaaggt ttattaataa cagtagtagt tatgtgtaca ggtaatgtat catgatccag |
| 1981 | tatcacagta ttgtgctgtt tatatacatt tttagtttgc atagatgagg tgtgtgtgtg |
| 2041 | cgctgcttct tgatctaggc aaacctttat aaagttgcag tacctaatct gttattccca |
| 2101 | cttctctgtt atttttgtgt gtctttttta atatataata tatatcaaga ttttcaaatt |
| 2161 | atttagaagc agattttcct gtagaaaaac taatttttct gccttttacc aaaaataaac |
| 2221 | tcttggggga agaaaaaaaa aaaaaaaaaa aaaaaaaaaa aaaaaaaaaa aaaaaaaaaa |
| 2281 | aaaaa |
| 6. SMAD3 human DNA, SMAD Family Member 3 | |
| (SEQ ID NO: 6) | |
| 1 | gccgtgggag ccgctccggg cgcagggccg cgcgccgagc cccgcaggct gcagcgccgc |
| 61 | ggcccggccc ggcgccccgg caacttcgcc gagagttgag gcgaagtttg ggcgaccgcg |
| 121 | gcaggccccg gccgagctcc cctctgcgcc cccggcgtcc cgtcgagccc agccccgccg |
| 181 | ggggcgctcc tcgccgcccg cgcgccctcc ccagccatgt cgtccatcct gcctttcact |
| 241 | cccccgatcg tgaagcgcct gctgggctgg aagaagggcg agcagaacgg gcaggaggag |
| 301 | aaatggtgcg agaaggcggt caagagcctg gtcaagaaac tcaagaagac ggggcagctg |
| 361 | gacgagctgg agaaggccat caccacgcag aacgtcaaca ccaagtgcat caccatcccc |
| 421 | aggtccctgg atggccggtt gcaggtgtcc catcggaagg ggctccctca tgtcatctac |
| 481 | tgccgcctgt ggcgatggcc agacctgcac agccaccacg agctgcgggc catggagctg |
| 541 | tgtgagttcg ccttcaatat gaagaaggac gaggtctgcg tgaatcccta ccactaccag |
| 601 | agagtagaga caccagttct acctcctgtg ttggtgccac gccacacaga gatcccggcc |
| 661 | gagttccccc cactggacga ctacagccat tccatccccg aaaacactaa cttccccgca |
| 721 | ggcatcgagc cccagagcaa tattccagag accccacccc ctggctacct gagtgaagat |
| 781 | ggagaaacca gtgaccacca gatgaaccac agcatggacg caggttctcc aaacctatcc |
| 841 | ccgaatccga tgtccccagc acataataac ttggacctgc agccagttac ctactgcgag |
| 901 | ccggccttct ggtgctccat ctcctactac gagctgaacc agcgcgtcgg ggagacattc |
| 961 | cacgcctcgc agccatccat gactgtggat ggcttcaccg acccctccaa ttcggagcgc |
| 1021 | ttctgcctag ggctgctctc caatgtcaac aggaatgcag cagtggagct gacacggaga |
| 1081 | cacatcggaa gaggcgtgcg gctctactac atcggagggg aggtcttcgc agagtgcctc |
| 1141 | agtgacagcg ctatttttgt ccagtctccc aactgtaacc agcgctatgg ctggcacccg |
| 1201 | gccaccgtct gcaagatccc accaggatgc aacctgaaga tcttcaacaa ccaggagttc |
| 1261 | gctgccctcc tggcccagtc ggtcaaccag ggctttgagg ctgtctacca gttgacccga |
| 1321 | atgtgcacca tccgcatgag cttcgtcaaa ggctggggag cggagtacag gagacagact |
| 1381 | gtgaccagta ccccctgctg gattgagctg cacctgaatg ggcctttgca gtggcttgac |
| 1441 | aaggtcctca cccagatggg ctccccaagc atccgctgtt ccagtgtgtc ttagagacat |
| 1501 | caagtatggt aggggagggc aggcttgggg aaaatggcca tgcaggaggt ggagaaaatt |
| 1561 | ggaactctac tcaacccatt gttgtcaagg aagaagaaat ctttctccct caactgaagg |
| 1621 | ggtgcaccca cctgttttct gaaacacacg agcaaaccca gaggtggatg ttatgaacag |
| 1681 | ctgtgtctgc caaacacatt taccctttgg ccccactttg aagggcaaga aatggcgtct |
| 1741 | gctctggtgg cttaagtgag cagaacaggt agtattacac caccggcccc ctccccccag |
| 1801 | actctttttt tgagtgacag ctttctggga tgtcacagtc caaccagaaa cacccctctg |
| 1861 | tctaggactg cagtgtggag ttcaccttgg aagggcgttc taggtaggaa gagcccgcag |
| 1921 | ggccatgcag acctcatgcc cagctctctg acgcttgtga cagtgcctct tccagtgaac |
| 1981 | attcccagcc cagccccgcc ccgccccgcc ccaccactcc agcagacctt gccccttgtg |
| 2041 | agctggatag acttgggatg gggagggagg gagttttgtc tgtctccctc ccctctcaga |
| 2101 | acatactgat tgggaggtgc gtgttcagca gaacctgcac acaggacagc gggaaaaatc |
| 2161 | gatgagcgcc acctctttaa aaactcactt acgtttgtcc tttttcactt tgaaaagttg |
| 2221 | gaaggatctg ctgaggccca gtgcatatgc aatgtatagt gtctattatc acattaatct |
| 2281 | caaagagatt cgaatgacgg taagtgttct catgaagcag gaggcccttg tcgtgggatg |
| 2341 | gcatttggtc tcaggcagca ccacactggg tgcgtctcca gtcatctgta agagcttgct |
| 2401 | ccagattctg atgcatacgg ctatattggt ttatgtagtc agttgcattc attaaatcaa |
| 2461 | ctttatcata aaaaaaaaaa aaaaa |
| 7. CTGF human DNA, Connective Tissue Growth Factor | |
| (SEQ ID NO: 7) | |
| 1 | gctgagagga gacagccagt gcgactccac cctccagctc gacggcagcc gccccggccg |
| 61 | acagccccga gacgacagcc cggcgcgtcc cggtccccac ctccgaccac cgccagcgct |
| 121 | ccaggccccg ccgctccccg ctcgccgcca ccgcgccctc cgctccgccc gcagtgccaa |
| 181 | ccatgaccgc cgccagtatg ggccccgtcc gcgtcgcctt cgtggtcctc ctcgccctct |
| 241 | gcagccggcc ggccgtcggc cagaactgca gcgggccgtg ccggtgcccg gacgagccgg |
| 301 | cgccgcgctg cccggcgggc gtgagcctcg tgctggacgg ctgcggctgc tgccgcgtct |
| 361 | gcgccaagca gctgggcgag ctgtgcaccg agcgcgaccc ctgcgacccg cacaagggcc |
| 421 | tcttctgtga cttcggctcc ccggccaacc gcaagatcgg cgtgtgcacc gccaaagatg |
| 481 | gtgctccctg catcttcggt ggtacggtgt accgcagcgg agagtccttc cagagcagct |
| 541 | gcaagtacca gtgcacgtgc ctggacgggg cggtgggctg catgcccctg tgcagcatgg |
| 601 | acgttcgtct gcccagccct gactgcccct tcccgaggag ggtcaagctg cccgggaaat |
| 661 | gctgcgagga gtgggtgtgt gacgagccca aggaccaaac cgtggttggg cctgccctcg |
| 721 | cggcttaccg actggaagac acgtttggcc cagacccaac tatgattaga gccaactgcc |
| 781 | tggtccagac cacagagtgg agcgcctgtt ccaagacctg tgggatgggc atctccaccc |
| 841 | gggttaccaa tgacaacgcc tcctgcaggc tagagaagca gagccgcctg tgcatggtca |
| 901 | ggccttgcga agctgacctg gaagagaaca ttaagaaggg caaaaagtgc atccgtactc |
| 961 | ccaaaatctc caagcctatc aagtttgagc tttctggctg caccagcatg aagacatacc |
| 1021 | gagctaaatt ctgtggagta tgtaccgacg gccgatgctg caccccccac agaaccacca |
| 1081 | ccctgccggt ggagttcaag tgccctgacg gcgaggtcat gaagaagaac atgatgttca |
| 1141 | tcaagacctg tgcctgccat tacaactgtc ccggagacaa tgacatcttt gaatcgctgt |
| 1201 | actacaggaa gatgtacgga gacatggcat gaagccagag agtgagagac attaactcat |
| 1261 | tagactggaa cttgaactga ttcacatctc atttttccgt aaaaatgatt tcagtagcac |
| 1321 | aagttattta aatctgtttt tctaactggg ggaaaagatt cccacccaat tcaaaacatt |
| 1381 | gtgccatgtc aaacaaatag tctatcaacc ccagacactg gtttgaagaa tgttaagact |
| 1441 | tgacagtgga actacattag tacacagcac cagaatgtat attaaggtgt ggctttagga |
| 1501 | gcagtgggag ggtaccagca gaaaggttag tatcatcaga tagcatctta tacgagtaat |
| 1561 | atgcctgcta tttgaagtgt aattgagaag gaaaatttta gcgtgctcac tgacctgcct |
| 1621 | gtagccccag tgacagctag gatgtgcatt ctccagccat caagagactg agtcaagttg |
| 1681 | ttccttaagt cagaacagca gactcagctc tgacattctg attcgaatga cactgttcag |
| 1741 | gaatcggaat cctgtcgatt agactggaca gcttgtggca agtgaatttg cctgtaacaa |
| 1801 | gccagatttt ttaaaattta tattgtaaat attgtgtgtg tgtgtgtgtg tgtatatata |
| 1861 | tatatatgta cagttatcta agttaattta aagttgtttg tgccttttta tttttgtttt |
| 1921 | taatgctttg atatttcaat gttagcctca atttctgaac accataggta gaatgtaaag |
| 1981 | cttgtctgat cgttcaaagc atgaaatgga tacttatatg gaaattctgc tcagatagaa |
| 2041 | tgacagtccg tcaaaacaga ttgtttgcaa aggggaggca tcagtgtcct tggcaggctg |
| 2101 | atttctaggt aggaaatgtg gtagcctcac ttttaatgaa caaatggcct ttattaaaaa |
| 2161 | ctgagtgact ctatatagct gatcagtttt ttcacctgga agcatttgtt tctactttga |
| 2221 | tatgactgtt tttcggacag tttatttgtt gagagtgtga ccaaaagtta catgtttgca |
| 2281 | cctttctagt tgaaaataaa gtgtatattt tttctataaa aaaaaaaaaa aaaa |
| 8. TGF-b1 human DNA, Transforming Growth Factor Beta 1 | |
| (SEQ ID NO: 8) | |
| 1 | cccagacctc gggcgcaccc cctgcacgcc gccttcatcc ccggcctgtc tcctgagccc |
| 61 | ccgcgcatcc tagacccttt ctcctccagg agacggatct ctctccgacc tgccacagat |
| 121 | cccctattca agaccaccca ccttctggta ccagatcgcg cccatctagg ttatttccgt |
| 181 | gggatactga gacacccccg gtccaagcct cccctccacc actgcgccct tctccctgag |
| 241 | gacctcagct ttccctcgag gccctcctac cttttgccgg gagaccccca gcccctgcag |
| 301 | gggcggggcc tccccaccac accagccctg ttcgcgctct cggcagtgcc ggggggcgcc |
| 361 | gcctccccca tgccgccctc cgggctgcgg ctgctgctgc tgctgctacc gctgctgtgg |
| 421 | ctactggtgc tgacgcctgg ccggccggcc gcgggactat ccacctgcaa gactatcgac |
| 481 | atggagctgg tgaagcggaa gcgcatcgag gccatccgcg gccagatcct gtccaagctg |
| 541 | cggctcgcca gccccccgag ccagggggag gtgccgcccg gcccgctgcc cgaggccgtg |
| 601 | ctcgccctgt acaacagcac ccgcgaccgg gtggccgggg agagtgcaga accggagccc |
| 661 | gagcctgagg ccgactacta cgccaaggag gtcacccgcg tgctaatggt ggaaacccac |
| 721 | aacgaaatct atgacaagtt caagcagagt acacacagca tatatatgtt cttcaacaca |
| 781 | tcagagctcc gagaagcggt acctgaaccc gtgttgctct cccgggcaga gctgcgtctg |
| 841 | ctgaggctca agttaaaagt ggagcagcac gtggagctgt accagaaata cagcaacaat |
| 901 | tcctggcgat acctcagcaa ccggctgctg gcacccagcg actcgccaga gtggttatct |
| 961 | tttgatgtca ccggagttgt gcggcagtgg ttgagccgtg gaggggaaat tgagggcttt |
| 1021 | cgccttagcg cccactgctc ctgtgacagc agggataaca cactgcaagt ggacatcaac |
| 1081 | gggttcacta ccggccgccg aggtgacctg gccaccattc atggcatgaa ccggcctttc |
| 1141 | ctgcttctca tggccacccc gctggagagg gcccagcatc tgcaaagctc ccggcaccgc |
| 1201 | cgagccctgg acaccaacta ttgcttcagc tccacggaga agaactgctg cgtgcggcag |
| 1261 | ctgtacattg acttccgcaa ggacctcggc tggaagtgga tccacgagcc caagggctac |
| 1321 | catgccaact tctgcctcgg gccctgcccc tacatttgga gcctggacac gcagtacagc |
| 1381 | aaggtcctgg ccctgtacaa ccagcataac ccgggcgcct cggcggcgcc gtgctgcgtg |
| 1441 | ccgcaggcgc tggagccgct gcccatcgtg tactacgtgg gccgcaagcc caaggtggag |
| 1501 | cagctgtcca acatgatcgt gcgctcctgc aagtgcagct gaggtcccgc cccgccccgc |
| 1561 | cccgccccgg caggcccggc cccaccccgc cccgcccccg ctgccttgcc catgggggct |
| 1621 | gtatttaagg acacccgtgc cccaagccca cctggggccc cattaaagat ggagagagga |
| 1681 | aaaaaaaaaa aaaaaaaaaa aaaaaaaaaa aaaaaaaaaa aaaaaaaaaa aaaaaaaaaa |
| 1741 | aaaaaa |
| 9. KRT6A human DNA, Keratin 6A | |
| (SEQ ID NO: 9) | |
| 1 | ctctcctcca gcctctcaca ctctcctcag ctctctcatc tcctggaacc atggccagca |
| 61 | catccaccac catcaggagc cacagcagca gccgccgggg tttcagtgcc agctcagcca |
| 121 | ggctccctgg ggtcagccgc tctggcttca gcagcgtctc cgtgtcccgc tccaggggca |
| 181 | gtggtggcct gggtggtgca tgtggaggag ctggctttgg cagccgcagt ctgtatggcc |
| 241 | tggggggctc caagaggatc tccattggag ggggcagctg tgccatcagt ggcggctatg |
| 301 | gcagcagagc cggaggcagc tatggctttg gtggcgccgg gagtggattt ggtttcggtg |
| 361 | gtggagccgg cattggcttt ggtctgggtg gtggagccgg ccttgctggt ggctttgggg |
| 421 | gccctggctt ccctgtgtgc ccccctggag gcatccaaga ggtcaccgtc aaccagagtc |
| 481 | tcctgactcc cctcaacctg caaatcgatc ccaccatcca gcgggtgcgg gccgaggagc |
| 541 | gtgaacagat caagaccctc aacaacaagt ttgcctcctt catcgacaag gtgcggttcc |
| 601 | tggagcagca gaacaaggtt ctggaaacaa agtggaccct gctgcaggag cagggcacca |
| 661 | agactgtgag gcagaacctg gagccgttgt tcgagcagta catcaacaac ctcaggaggc |
| 721 | agctggacag cattgtcggg gaacggggcc gcctggactc agagctcaga ggcatgcagg |
| 781 | acctggtgga ggacttcaag aacaaatatg aggatgaaat caacaagcgc acagcagcag |
| 841 | agaatgaatt tgtgactctg aagaaggacg tggatgctgc ctacatgaac aaggttgaac |
| 901 | tgcaagccaa ggcagacact ctcacagacg agatcaactt cctgagagcc ttgtatgatg |
| 961 | cagagctgtc ccagatgcag acccacatct cagacacatc tgtggtgctg tccatggaca |
| 1021 | acaaccgcaa cctggacctg gacagcatca tcgctgaggt caaggcccaa tatgaggaga |
| 1081 | ttgctcagag aagccgggct gaggctgagt cctggtacca gaccaagtac gaggagctgc |
| 1141 | aggtcacagc aggcagacat ggggacgacc tgcgcaacac caagcaggag attgctgaga |
| 1201 | tcaaccgcat gatccagagg ctgagatctg agatcgacca cgtcaagaag cagtgcgcca |
| 1261 | acctgcaggc cgccattgct gatgctgagc agcgtgggga gatggccctc aaggatgcca |
| 1321 | agaacaagct ggaagggctg gaggatgccc tgcagaaggc caagcaggac ctggcccggc |
| 1381 | tgctgaagga gtaccaggag ctgatgaatg tcaagctggc cctggacgtg gagatcgcca |
| 1441 | cctaccgcaa gctgctggag ggtgaggagt gcaggctgaa tggcgaaggc gttggacaag |
| 1501 | tcaacatctc tgtggtgcag tccaccgtct ccagtggcta tggcggtgcc agtggtgtcg |
| 1561 | gcagtggctt aggcctgggt ggaggaagca gctactccta tggcagtggt cttggcgttg |
| 1621 | gaggtggctt cagttccagc agtggcagag ccattggggg tggcctcagc tctgttggag |
| 1681 | gcggcagttc caccatcaag tacaccacca cctcctcctc cagcaggaag agctataagc |
| 1741 | actaaagtgc gtctgctagc tctcggtccc acagtcctca ggcccctctc tggctgcaga |
| 1801 | gccctctcct caggttgcct gtcctctcct ggcctccagt ctcccctgct gtcccaggta |
| 1861 | gagctgggga tgaatgctta gtgccttcac ttcttctctc tctctctata ccatctgagc |
| 1921 | acccattgct caccatcaga tcaacctctg attttacatc atgatgtaat caccactgga |
| 1981 | gcttcacttt gttactaaat tattaatttc ttgcctccag tgttctatct ctgaggctga |
| 2041 | gcattataag aaaatgacct ctgctccttt tcattgcaga aaattgccag gggcttattt |
| 2101 | cagaacaact tccacttact ttccactggc tctcaaactc tctaacttat aagtgttgtg |
| 2161 | aacccccacc caggcagtat ccatgaaagc acaagtgact agtcctatga tgtacaaagc |
| 2221 | ctgtatctct gtgatgattt ctgtgctctt cgctctttgc aattgctaaa taaagcagat |
| 2281 | ttataataca ataaaaaaaa aaaaaaaaaa aaaaaaaaaa aaaaaaaaaa aaaaaaaaaa |
| 2341 | aaaaa |
| 10. NOTCH1 (cytoplasmic domain) human DNA, Notch 1 | |
| (SEQ ID NO: 10) | |
| tcccgcaagcgccggcggcagcatggccagctctggttccctgagggtttcaaagtgtcagaggccagca | |
| agaagaagcggagagagcccctcggcgaggactcagtcggcctcaagcccctgaagaatgcctcagatgg | |
| tgctctgatggacgacaatcagaacgagtggggagacgaagacctggagaccaagaagttccggtttgag | |
| gagccagtagttctccctgacctgagtgatcagactgaccacaggcagtggacccagcagcacctggacg | |
| ctgctgacctgcgcatgtctgccatggccccaacaccgcctcagggggaggtggatgctgactgcatgga | |
| tgtcaatgttcgaggaccagatggcttcacacccctcatgattgcctcctgcagtggagggggccttgag | |
| acaggcaacagtgaagaagaagaagatgcacctgctgtcatctctgacttcatctaccagggcgccagct | |
| tgcacaaccagacagaccgcaccggggagaccgccttgcacttggctgcccgatactctcgttcagatgc | |
| tgcaaagcgcttgctggaggccagtgcagatgccaacatccaggacaacatgggccgtactccgttacat | |
| gcagcagtttctgcagatgctcagggtgtcttccagatcctgctccggaacagggccacagatctggatg | |
| cccgaatgcatgatggcacaactccactgatcctggctgcgcgcctggccgtggagggcatgctggagga | |
| cctcatcaactcacatgctgacgtcaatgccgtggatgacctaggcaagtcggctttgcattgggcggcc | |
| gcggtgaacaatgtggatgctgctgttgtgctcctgaagaacggagccaacaaggacatgcagaacaaca | |
| aggaggagactcccctgttcctggccgcccgtgagggcagctatgagactgccaaagtgttgctggacca | |
| ctttgccaaccgggacatcacggatcacatggaccgattgccgcgggacatcgcacaggagcgtatgcac | |
| cacgatatcgtgcggcttttggatgagtacaacctggtgcgcagcccacagctgcatggcactgccctgg | |
| gtggcacacccactctgtctcccacactctgctcgcccaatggctacctgggcaatctcaagtctgccac | |
| acagggcaagaaggcccgcaagcccagcaccaaagggctggcttgtggtagcaaggaagctaaggacctc | |
| aaggcacggaggaagaagtcccaggatggcaagggctgcctgttggacagctcgagcatgctgtcgcctg | |
| tggactccctcgagtcaccccatggctacttgtcagatgtggcctcgccacccctcctcccctccccatt | |
| ccagcagtctccatccatgcctctcagccacctgcctggtatgcctgacactcacctgggcatcagccac | |
| ttgaatgtggcagccaagcctgagatggcagcactggctggaggtagccggttggcctttgagccacccc | |
| cgccacgcctctcccacctgcctgtagcctccagtgccagcacagtgctgagtaccaatggcacgggggc | |
| tatgaatttcaccgtgggtgcaccggcaagcttgaatggccagtgtgagtggcttccccggctccagaat | |
| ggcatggtgcccagccagtacaacccactacggccgggtgtgacgccgggcacactgagcacacaggcag | |
| ctggcctccagcatagcatgatggggccactacacagcagcctctccaccaataccttgtccccgattat | |
| ttaccagggcctgcccaacacacggctggcaacacagcctcacctggtgcagacccagcaggtgcagcca | |
| cagaacttacagctccagcctcagaacctgcagccaccatcacagccacacctcagtgtgagctcggcag | |
| ccaatgggcacctgggccggagcttcttgagtggggagcccagtcaggcagatgtacaaccgctgggccc | |
| cagcagtctgcctgtgcacaccattctgccccaggaaagccaggccctgcccacatcactgccatcctcc | |
| atggtcccacccatgaccactacccagttcctgacccctccttcccagcacagttactcctcctcccctg | |
| tggacaacacccccagccaccagctgcaggtgccagagcaccccttcctcaccccatcccctgagtcccc | |
| tgaccagtggtccagctcctccccgcattccaacatctctgattggtccgagggcatctccagcccgccc | |
| accaccatgccgtcccagatcacccacattccagaggcatttaaataa | |
| 11. TET2 mouse DNA, Tet Methylcytosine Dioxygenase 2 | |
| (SEQ ID NO: 11) | |
| 1 | catcaatgct acttaacatg tgttcatggg caagtcatat ttaggagtat gtgctaccat |
| 61 | aacaattgtg catgtgcaca cacacacact cacatatttc actaatgagt agtttgggca |
| 121 | taaatttgaa agagagcagg gagggttata agtgagggtt tggagggagg aaacggatgg |
| 181 | ggaaatgtgg gacctggcag tgctagattg cttaccttac tacaccgaga agccttttcc |
| 241 | tcagtaatag tgtgctctat ttttggtcat (ccattatgc tctugatata aagtgcaaaa |
| 301 | gtctaaagaa ctttcccatt gacacacatc tgtctgtcag gitgaatttg aacaccaagc |
| 361 | cccagactgc tgtttgggtc tgaaggaagg ccggccattc Icaggagtca ctgcatgttt |
| 421 | ggacttctct gctcattccc acagagacca gcagaacatg ccaaatggca gtacagtggt |
| 481 | ggtcaccctc aatagagaag acaatcgaga agtcggagct aagcctgagg atgagcagtt |
| 541 | ccacgtgctg cctatgtaca tcatcgcccc Igaggatgag tttgggagta cggaaggcca |
| 601 | ggagaagaag atacggatgg ggtccattga ggttctgcag tcatttcgga ggagaagggt |
| 661 | cataaggata ggagagctgc ccaagagttg caagaagaaa gcggagccca agaaagccaa |
| 721 | gaccaagaaa gcagctcgaa agcgttcctc (ctggagaac tgctccagta ggactgagaa |
| 781 | gggaaagtct tcctcacata caaagctgat ggaaaatgca agccatatga aacaaatgac |
| 841 | agcacaaccg cagctttcgg gcccggtcat ccggcagcca ccaacactcc agaggcacct |
| 901 | tcagcaaggg cagaggccac agcagccgca gccacctcag ccgcagccgc agacgacacc |
| 961 | tcagccacag ccacagccac agcatatcat gcccggtaac tctcagtctg ttggttctca |
| 1021 | ttgttctgga tccaccagtg tctacacgag acagcctact cctcacagtc cttatcccag |
| 1081 | ctcagcacac acctcagata tttatggaga taccaaccat gtgaactttt accccacttc |
| 1141 | atctcatgcc tcgggttcat atttgaatcc ttctaattac atgaacccct accttgggct |
| 1201 | tttgaatcag aataaccaat atgcaccttt tccatacaat gggagtgtgc cagtggacaa |
| 1261 | tggttcccct ttcttaggtt cttattcccc ccaggctcag tccagggatc tacatagata |
| 1321 | tccaaaccag gaccatctca ccaatcagaa cttaccaccc atccacaccc ttcaccaaca |
| 1381 | gacgtttggg gacagtccct ctaagtactt aagttatgga aaccaaaata tgcagagaga |
| 1441 | tgccttcact actaactcca ccctaaaacc aaatgtacac cacctagcaa cgttttctcc |
| 1501 | ttaccccacc cccaagatgg atagtcattt catgggagct gcctccagat caccatacag |
| 1561 | ccacccacac actgactaca aaaccagtga gcatcatcta ccctctcaca cgatctacag |
| 1621 | ctacacggca gcagcttcgg ggagcagttc cagccacgcc ttccacaaca aggagaatga |
| 1681 | caacatagcc aatgggctct caagagtgct tccagggttt aatcatgata gaactgcttc |
| 1741 | tgcccaagaa ctattataca gtctgactgg cagcagtcag gagaagcagc ctgaggtgtc |
| 1801 | aggccaggat gcagctgctg (gcaggaaat tgagtattgg icagatagtg agcacaactt |
| 1861 | tcaggatcct tgcattggag gggtggctat agctccaact catgggtcaa ItcttatCga |
| 1921 | gtgtgcaaag tgtgaggttc atgccacaac caaagtaaac gatcccgacc ggaatcaccc |
| 1981 | caccaggatc tcacttgtac tgtataggca taagaatttg tttctaccaa aacattgttt |
| 2041 | ggctctctgg gaagccaaaa tggctgaaaa ggcccggaaa gaggaagagt gcggaaagaa |
| 2101 | tggatcagac cacgtgtctc agaaaaatca tggcaaacag gaaaagcgtg agcccacagg |
| 2161 | gccacaggaa cccagttacc tgcgtttcat ccagtctctt gctgagaaca cagggtctgt |
| 2221 | gactacggat tctaccgtga ctacatcacc atatgctttc actcaggtca cagggcctta |
| 2281 | caacacattt gtatgacgct ggccattagg ccagaccacc aaggacgacc tgtgagcagt |
| 2341 | atgtctttca tggcatgggc cgtagggaca ggtcacagca tctgtgacaa atgcagtgtg |
| 2401 | tgtttgtgtg tatgtttatt gggggggggc tgtcagctca ccagcaaaat agtttatttt |
| 2461 | atcattatat ttaatctctc ccgtggtcca tggtggcatt caggaagagc atcctatgca |
| 2521 | agggcacagt gggaaggaag cgctggacat ttgtcttgaa aaccactggt tctcttattg |
| 2581 | gctgaggtca tgcgtgtgcc atgcccctca gcactctaca cgtaactgct tctagtactc |
| 2641 | agcgtgtgta accgtgggac acagcgctgt agtagagcag ttgcaggatc atctggtgct |
| 2701 | gacgtatgat gtactgaaga aatactggaa ctaagacttt ttaacatgca ggttttttac |
| 2761 | tgtaatctta ataacttatt tatcaaagta gctacagaaa gcttaagtga ataatggcaa |
| 2821 | aacactgaat ctgtttgggt gttaacatta aatggtgcta caaatggtgt ttttaatagc |
| 2881 | tgaaaaatca atgccttcta tcatctagcc agtgtggtcg agggccctgg aggcactggg |
| 2941 | gtacctctga ttttacattt ctatcttaat tattcagctt agtttttaaa atgtggacat |
| 3001 | ttcaaaggcc tctggattgt agttatccac cgatgtcctt gtaggactat aatgtataga |
| 3061 | tatgcacact tacacatgtg tactgaaata ttttaagttg tgtcttagaa aagcactttg |
| 3121 | cctacctaag ctttggcaac ttgggcaatg ctaaggtact aaaacataaa aacaaaaaaa |
| 3181 | aaaaaaaa |
| 12. TET3 human DNA, Tet Methylcytosine Dioxygenase 3 | |
| (SEQ ID NO: 12) | |
| 1 | ggccccacgg tcgcctctat ccgggaactc atggaggagc ggtatggaga gaaggggaaa |
| 61 | gccatccgga tcgagaaggt catctacacg gggaaggagg gaaagagctc ccgcggttgc |
| 121 | cccattgcaa agtgggtgat ccgcaggcac acgctggagg agaagctact ctgcctggtg |
| 181 | cggcaccggg caggccacca ctgccagaac gctgtgatcg tcatcctcat cctggcctgg |
| 241 | gagggcattc cccgtagcct cggagacacc ctctaccagg agctcaccga caccctccgg |
| 301 | aagtatggga accccaccag ccggagatgc ggcctcaacg atgaccggac ctgcgcttgc |
| 361 | caaggcaaag accccaacac ctgtggtgcc tccttctcct ttggttgttc ctggagcatg |
| 421 | tacttcaacg gctgcaagta tgctcggagc aagacacctc gcaagttccg cctcgcaggg |
| 481 | gacaatccca aagaggaaga agtgctccgg aagagtttcc aggacctggc caccgaagtc |
| 541 | gctcccctgt acaagcgact ggcccctcag gcctatcaga accaggtgac caacgaggaa |
| 601 | atagcgattg actgccgtct ggggctgaag gaaggacggc ccttcgcggg ggtcacggcc |
| 661 | tgcatggact tctgtgccca cgcccacaag gaccagcata acctctacaa tgggtgcacc |
| 721 | gtggtctgca ccctgaccaa ggaagacaat cgctgcgtgg gcaagattcc cgaggatgag |
| 781 | cagctgcatg ttctccccct gtacaagatg gccaacacgg atgagtttgg tagcgaggag |
| 841 | aaccagaatg caaaggtggg cagcggagcc atccaggtgc tcaccgcctt cccccgcgag |
| 901 | gtccgacgcc tgcccgagcc tgccaagtcc tgccgccagc ggcagctgga agccagaaag |
| 961 | gcagcagccg agaagaagaa gattcagaag gagaagctga gcactccgga gaagatcaag |
| 1021 | caggaggccc tggagctggc gggcattacg tcggacccag gcctgtctct gaagggtgga |
| 1081 | ttgtcccagc aaggcctgaa gccctccctc aaggtggagc cgcagaacca cttcagctcc |
| 1141 | ttcaagtaca gcggcaacgc ggtggtggag agctactcgg tgctgggcaa ctgccggccc |
| 1201 | tccgaccctt acagcatgaa cagcgtgtac tcctaccact cctactatgc acagcccagc |
| 1261 | ctgacctccg tcaatggctt ccactccaag tacgctctcc cgtcttttag ctactatggc |
| 1321 | tttccatcca gcaaccccgt cttcccctct cagttcctgg gtcctggtgc ctgggggcat |
| 1381 | agtggcagca gtggcagttt tgagaagaag ccagacctcc acgctctgca caacagcctg |
| 1441 | agcccggcct acggtggtgc tgagtttgcc gagctgccca gccaggctgt tcccacagac |
| 1501 | gcccaccacc ccactcctca ccaccagcag cctgcgtacc caggccccaa ggagtatctg |
| 1561 | cttcccaagg cccccctact ccactcagtg tccagggacc cctccccctt tgcccagagc |
| 1621 | tccaactgct acaacagatc catcaagcaa gagccagtag acccgctgac ccaggctgag |
| 1681 | cctgtgccca gagacgctgg caagatgggc aagacacctc tgtccgaggt gtctcagaat |
| 1741 | ggaggaccca gtcacctttg gggacagtac tcaggaggcc caagcatgtc ccccaagagg |
| 1801 | actaacggtg tgggtggcag ctggggtgtg ttctcgtctg gggagagtcc tgccatcgtc |
| 1861 | cctgacaagc tcagttcctt tggggccagc tgcctggccc cttcccactt cacagatggc |
| 1921 | cagtgggggc tgttccccgg tgaggggcag caggcagctt cccactctgg aggacggctg |
| 1981 | cgaggcaaac cgtggagccc ctgcaagttt gggaacagca cctcggcctt ggctgggccc |
| 2041 | agcctgactg agaagccgtg ggcgctgggg gcaggggatt tcaactcggc cctgaaaggt |
| 2101 | agtcctgggt tccaagacaa gctgtggaac cccatgaaag gagaggaggg caggattcca |
| 2161 | gccgcagggg ccagccagct ggacagggcc tggcagtcct ttggtctgcc cctgggatcc |
| 2221 | agcgagaagc tgtttggggc tctgaagtca gaggagaagc tgtgggaccc cttcagcctg |
| 2281 | gaggaggggc cggctgagga gccccccagc aagggagcgg tgaaggagga gaagggcggt |
| 2341 | ggtggtgcgg aggaggaaga ggaggagctg tggtcggaca gtgaacacaa cttcctggac |
| 2401 | gagaacatcg gcggcgtggc cgtggcccca gcccacggct ccatcctcat cgagtgtgcc |
| 2461 | cggcgggagc tgcacgccac cacgccgctt aagaagccca accgctgcca ccccacccgc |
| 2521 | atctcgctgg tcttctacca gcacaagaac ctcaaccagc ccaaccacgg gctggccctc |
| 2581 | tgggaagcca agatgaagca gctggcggag agggcacggg cacggcagga ggaggctgcc |
| 2641 | cggctgggcc tgggccagca ggaggccaag ctctacggga agaagcgcaa gtgggggggc |
| 2701 | actgtggttg ctgagcccca gcagaaagag aagaaggggg tcgtccccac ccggcaggca |
| 2761 | ctggctgtgc ccacagactc ggcggtcacc gtgtcctcct atgcctacac gaaggtcact |
| 2821 | ggcccctaca gccgctggat ctaggtgcca gggagccagc gtacctcagc gtcgggcctg |
| 2881 | gcccgagctg tctctgtggt gcttttgccc tcatacctgg gggcgggttg ggggtgcaga |
| 2941 | agtcttttta tctctatata catatataga tgcgcatatc atatatatgt atttatggtc |
| 3001 | caaacctcag aactgacccg cccctccctt acccccactt ccccagcact ttgaagaaga |
| 3061 | aactacggct gtcgggtgat ttttccgtga tcttaatatt tatatctcca agttgtcccc |
| 3121 | cccccttgtc tggggggttt ttatttttat tttctctttg tttttaaaac tctatccttg |
| 3181 | tatatcacaa taatggaaag aaagtttata gtatcctttc acaaaggagt agttttaaaa |
| 3241 | aaaaaaaaaa a |
| 13. Sirt1 human DNA,, Sirtuin 1 | |
| (SEQ ID NO: 13) | |
| 1 | aagacgacga cgacgagggc gaggaggagg aagaggcggc ggcggcggcg attgggtacc |
| 61 | gagataacct tctgttcggt gatgaaatta tcactaatgg ttttcattcc tgtgaaagtg |
| 121 | atgaggagga tagagcctca catgcaagct ctagtgactg gactccaagg ccacggatag |
| 181 | gtccatatac ttttgtccag caacatctta tgattggcac agatcctcga acaattctta |
| 241 | aagatttatt gccggaaaca atacctccac ctgagttgga tgatatgaca ctgtggcaga |
| 301 | ttgttattaa tatcctttca gaaccaccaa aaaggaaaaa aagaaaagat attaatacaa |
| 361 | ttgaagatgc tgtgaaatta ctgcaagagt gcaaaaaaat tatagttcta actggagctg |
| 421 | gggtgtctgt ttcatgtgga atacctgact tcaggtcaag ggatggtatt tatgctcgcc |
| 481 | ttgctgtaga cttcccagat cttccagatc ctcaagcgat gtttgatatt gaatatttca |
| 541 | gaaaagatcc aagaccattc ttcaagtttg caaaggaaat atatcctgga caattccagc |
| 601 | catctctctg tcacaaattc atagccttgt cagataagga aggaaaacta cttcgcaact |
| 661 | atacccagaa catagacacg ctggaacagg ttgcgggaat ccaaaggata attcagtgtc |
| 721 | atggttcctt tgcaacagca tcttgcctga tttgtaaata caaagttgac tgtgaagctg |
| 781 | tacgaggagc tctttttagt caggtagttc ctcgatgtcc taggtgccca gctgatgaac |
| 841 | cgcttgctat catgaaacca gagattgtgt tttttggtga aaatttacca gaacagtttc |
| 901 | atagagccat gaagtatgac aaagatgaag ttgacctcct cattgttatt gggtcttccc |
| 961 | tcaaagtaag accagtagca ctaattccaa gttccatacc ccatgaagtg cctcagatat |
| 1021 | taattaatag agaacctttg cctcatctgc attttgatgt agagcttctt ggagactgtg |
| 1081 | atgtcataat taatgaattg tgtcataggt taggtggtga atatgccaaa ctttgctgta |
| 1141 | accctgtaaa gctttcagaa attactgaaa aacctccacg aacacaaaaa gaattggctt |
| 1201 | atttgtcaga gttgccaccc acacctcttc atgtttcaga agactcaagt tcaccagaaa |
| 1261 | gaacttcacc accagattct tcagtgattg tcacactttt agaccaagca gctaagagta |
| 1321 | atgatgattt agatgtgtct gaatcaaaag gttgtatgga agaaaaacca caggaagtac |
| 1381 | aaacttctag gaatgttgaa agtattgctg aacagatgga aaatccggat ttgaagaatg |
| 1441 | ttggttctag tactggggag aaaaatgaaa gaacttcagt ggctggaaca gtgagaaaat |
| 1501 | gctggcctaa tagagtggca aaggagcaga ttagtaggcg gcttgatggt aatcagtatc |
| 1561 | tgtttttgcc accaaatcgt tacattttcc atggcgctga ggtatattca gactctgaag |
| 1621 | atgacgtctt atcctctagt tcttgtggca gtaacagtga tagtgggaca tgccagagtc |
| 1681 | caagtttaga agaacccatg gaggatgaaa gtgaaattga agaattctac aatggcttag |
| 1741 | aagatgagcc tgatgttcca gagagagctg gaggagctgg atttgggact gatggagatg |
| 1801 | atcaagaggc aattaatgaa gctatatctg tgaaacagga agtaacagac atgaactatc |
| 1861 | catcaaacaa atcatagtgt aataattgtg caggtacagg aattgttcca ccagcattag |
| 1921 | gaactttagc atgtcaaaat gaatgtttac ttgtgaactc gatagagcaa ggaaaccaga |
| 1981 | aaggtgtaat atttataggt tggtaaaata gattgttttt catggataat ttttaacttc |
| 2041 | attatttctg tacttgtaca aactcaacac taactttttt ttttttaaaa aaaaaaaggt |
| 2101 | actaagtatc ttcaatcagc tgttggtcaa gactaacttt cttttaaagg ttcatttgta |
| 2161 | tgataaattc atatgtgtat atataatttt tttttgtttt gtctagtgag tttcaacatt |
| 2221 | tttaaagttt tcaaaaagcc atcggaatgt taaattaatg taaagggaac agctaatcta |
| 2281 | gaccaaagaa tggtattttc acttttcttt gtaacattga atggtttgaa gtactcaaaa |
| 2341 | tctgttacgc taaacttttg attctttaac acaattattt ttaaacactg gcattttcca |
| 2401 | aaactgtggc agctaacttt ttaaaatctc aaatgacatg cagtgtgagt agaaggaagt |
| 2461 | caacaatatg tggggagagc actcggttgt ctttactttt aaaagtaata cttggtgcta |
| 2521 | agaatttcag gattattgta tttacgttca aatgaagatg gcttttgtac ttcctgtgga |
| 2581 | catgtagtaa tgtctatatt ggctcataaa actaacctga aaaacaaata aatgctttgg |
| 2641 | aaatgtttca gttgctttag aaacattagt gcctgcctgg atccccttag ttttgaaata |
| 2701 | tttgccattg ttgtttaaat acctatcact gtggtagagc ttgcattgat cttttccaca |
| 2761 | agtattaaac tgccaaaatg tgaatatgca aagcctttct gaatctataa taatggtact |
| 2821 | tctactgggg agagtgtaat attttggact gctgttttcc attaatgagg agagcaacag |
| 2881 | gcccctgatt atacagttcc aaagtaataa gatgttaatt gtaattcagc cagaaagtac |
| 2941 | atgtctccca ttgggaggat ttggtgttaa ataccaaact gctagcccta gtattatgga |
| 3001 | gatgaacatg atgatgtaac ttgtaatagc agaatagtta atgaatgaaa ctagttctta |
| 3061 | taatttatct ttatttaaaa gcttagcctg ccttaaaact agagatcaac tttctcagct |
| 3121 | gcaaaagctt ctagtctttc aagaagttca tactttatga aattgcacag taagcattta |
| 3181 | tttttcagac catttttgaa catcactcct aaattaataa agtattcctc tgttgcttta |
| 3241 | gtatttatta caataaaaag ggtttgaaat atagctgttc tttatgcata aaacacccag |
| 3301 | ctaggaccat tactgccaga gaaaaaaatc gtattgaatg gccatttccc tacttataag |
| 3361 | atgtctcaat ctgaatttat ttggctacac taaagaatgc agtatattta gttttccatt |
| 3421 | tgcatgatgt ttgtgtgcta tagatgatat tttaaattga aaagtttgtt ttaaattatt |
| 3481 | tttacagtga agactgtttt cagctctttt tatattgtac atagtctttt atgtaattta |
| 3541 | ctggcatatg ttttgtagac tgtttaatga ctggatatct tccttcaact tttgaaatac |
| 3601 | aaaaccagtg ttttttactt gtacactgtt ttaaagtcta ttaaaattgt catttgactt |
| 3661 | ttttctgtta acttaaaaaa aaaaaaaaaa a |
| 14. Sirt6 human DNA, Sirtuin 6 | |
| (SEQ ID NO: 14) | |
| 1 | ggcagtcgag gatgtcggtg aattacgcgg cggggctgtc gccgtacgcg gacaagggca |
| 61 | agtgcggcct cccggagatc ttcgaccccc cggaggagct ggagcggaag gtgtgggaac |
| 121 | tggcgaggct ggtctggcag tcttccaatg tggtgttcca cacgggtgcc ggcatcagca |
| 181 | ctgcctctgg catccccgac ttcaggggtc cccacggagt ctggaccatg gaggagcgag |
| 241 | gtctggcccc caagttcgac accacctttg agagcgcgcg gcccacgcag acccacatgg |
| 301 | cgctggtgca gctggagcgc gtgggcctcc tccgcttcct ggtcagccag aacgtggacg |
| 361 | ggctccatgt gcgctcaggc ttccccaggg acaaactggc agagctccac gggaacatgt |
| 421 | ttgtggaaga atgtgccaag tgtaagacgc agtacgtccg agacacagtc gtgggcacca |
| 481 | tgggcctgaa ggccacgggc cggctctgca ccgtggctaa ggcaaggggg ctgcgagcct |
| 541 | gcaggaacgc cgacctgtcc atcacgctgg gtacatcgct gcagatccgg cccagcggga |
| 601 | acctgccgct ggctaccaag cgccggggag gccgcctggt catcgtcaac ctgcagccca |
| 661 | ccaagcacga ccgccatgct gacctccgca tccatggcta cgttgacgag gtcatgaccc |
| 721 | ggctcatgaa gcacctgggg ctggagatcc ccgcctggga cggcccccgt gtgctggaga |
| 781 | gggcgctgcc acccctgccc cgcccgccca cccccaagct ggagcccaag gaggaatctc |
| 841 | ccacccggat caacggctct atccccgccg gccccaagca ggagccctgc gcccagcaca |
| 901 | acggctcaga gcccgccagc cccaaacggg agcggcccac cagccctgcc ccccacagac |
| 961 | cccccaaaag ggtgaaggcc aaggcggtcc ccagctgacc agggtgcttg gggagggtgg |
| 1021 | ggctttttgt agaaactgtg gattcttttt ctctcgtggt ctcactttgt tacttgtttc |
| 1081 | tgtccccggg agcctcaggg ctctgagagc tgtgctccag gccaggggtt acacctgccc |
| 1141 | tccgtggtcc ctccctgggc tccaggggcc tctggtgcgg ttccgggaag aagccacacc |
| 1201 | ccagaggtga cagctgagcc cctgccacac cccagcctct gacttgctgt gttgtccaga |
| 1261 | ggtgaggctg ggccctccct ggtctccagc ttaaacagga gtgaactccc tctgtcccca |
| 1321 | gggcctccct tctgggcccc ctacagccca ccctacccct cctccatggg ccctgcagga |
| 1381 | ggggagaccc accttgaagt gggggatcag tagaggcttg cactgccttt ggggctggag |
| 1441 | ggagacgtgg gtccaccagg cttctggaaa agtcctcaat gcaataaaaa caatttcttt |
| 1501 | cttgcaaaaa aaaaaaaaaa aaaaaaaaaa aaaaaaaaaa aaaaaaaaaa aaaaaaaaaa |
| 1561 | aaaaaaaaaa aaaaaaaaaa aaaaa |
| 15. Pck1 human DNA, Phosphoenolpyruvate Carboxykinase 1 | |
| (SEQ ID NO: 15) | |
| 1 | ggggacggcc ttcccactgg gaacacaaac ttgctggcgg gaagagcccg gaaagaaacc |
| 61 | tgtggatctc ccttcgagat catccaaaga gaagaaaggt gacctcacat tcgtgcccct |
| 121 | tagcagcact ctgcagaaat gcctcctcag ctgcaaaacg gcctgaacct ctcggccaaa |
| 181 | gttgtccagg gaagcctgga cagcctgccc caggcagtga gggagtttct cgagaataac |
| 241 | gctgagctgt gtcagcctga tcacatccac atctgtgacg gctctgagga ggagaatggg |
| 301 | cggcttctgg gccagatgga ggaagagggc atcctcaggc ggctgaagaa gtatgacaac |
| 361 | tgctggttgg ctctcactga ccccagggat gtggccagga tcgaaagcaa gacggttatc |
| 421 | gtcacccaag agcaaagaga cacagtgccc atccccaaaa caggcctcag ccagctcggt |
| 481 | cgctggatgt cagaggagga ttttgagaaa gcgttcaatg ccaggttccc agggtgcatg |
| 541 | aaaggtcgca ccatgtacgt catcccattc agcatggggc cgctgggctc acctctgtcg |
| 601 | aagatcggca tcgagctgac ggattcgccc tacgtggtgg ccagcatgcg gatcatgacg |
| 661 | cggatgggca cgcccgtcct ggaagcactg ggcgatgggg agtttgtcaa atgcctccat |
| 721 | tctgtggggt gccctctgcc tttacaaaag cctttggtca acaactggcc ctgcaacccg |
| 781 | gagctgacgc tcatcgccca cctgcctgac cgcagagaga tcatctcctt tggcagtggg |
| 841 | tacggcggga actcgctgct cgggaagaag tgctttgctc tcaggatggc cagccggctg |
| 901 | gccaaggagg aagggtggct ggcagagcac atgctggttc tgggtataac caaccctgag |
| 961 | ggtgagaaga agtacctggc ggccgcattt cccagcgcct gcgggaagac caacctggcc |
| 1021 | atgatgaacc ccagcctccc cgggtggaag gttgagtgcg tcggggatga cattgcctgg |
| 1081 | atgaagtttg acgcacaagg tcatttaagg gccatcaacc cagaaaatgg ctttttcggt |
| 1141 | gtcgctcctg ggacttcagt gaagaccaac cccaatgcca tcaagaccat ccagaagaac |
| 1201 | acaatcttta ccaatgtggc cgagaccagc gacgggggcg tttactggga aggcattgat |
| 1261 | gagccgctag cttcaggtgt caccatcacg tcctggaaga ataaggagtg gagctcagag |
| 1321 | gatggggaac cttgtgccca ccccaactcg aggttctgca cccctgccag ccagtgcccc |
| 1381 | atcattgatg ctgcctggga gtctccggaa ggtgttccca ttgaaggcat tatctttgga |
| 1441 | ggccgtagac ctgctggtgt ccctctagtc tatgaagctc tcagctggca acatggagtc |
| 1501 | tttgtggggg cggccatgag atcagaggcc acagcggctg cagaacataa aggcaaaatc |
| 1561 | atcatgcatg acccctttgc catgcggccc ttctttggct acaacttcgg caaatacctg |
| 1621 | gcccactggc ttagcatggc ccagcaccca gcagccaaac tgcccaagat cttccatgtc |
| 1681 | aactggttcc ggaaggacaa ggaaggcaaa ttcctctggc caggctttgg agagaactcc |
| 1741 | agggtgctgg agtggatgtt caaccggatc gatggaaaag ccagcaccaa gctcacgccc |
| 1801 | ataggctaca tccccaagga ggatgccctg aacctgaaag gcctggggca catcaacatg |
| 1861 | atggagcttt tcagcatctc caaggaattc tgggagaagg aggtggaaga catcgagaag |
| 1921 | tatctggagg atcaagtcaa tgccgacctc ccctgtgaaa tcgagagaga gatccttgcc |
| 1981 | ttgaagcaaa gaataagcca gatgtaatca gggcctgagt gctttacctt taaaatcatt |
| 2041 | ccctttccca tccataaggt gcagtaggag caagagaggg caagtgttcc caaattgacg |
| 2101 | ccaccataat aatcatcacc acaccgggag cagatctgaa aggcacactt tgattttttt |
| 2161 | aaggataaga accacagaac actgggtagt agctaatgaa attgagaagg gaaatcttag |
| 2221 | catgcctcca aaaattcaca tccaatgcat agtttgttca aatttaaggt tactcaggca |
| 2281 | ttgatctttt cagtgttttt tcactttagc tatgtggatt agctagaatg cacaccaaaa |
| 2341 | aaatacttga gctgtatata tatgtgtgtg tgtgtgtgtg tgtgtgtgtg catgtatgtg |
| 2401 | cacatgtgtc tgtgtggtat atttgtgtat gtgtatttgt atgtactgtt attgaaaata |
| 2461 | tatttaatac ctttggaaaa atcttgggca agatgaccta ctagttttcc ttgaaaaaaa |
| 2521 | gttgctttgt tattaatatt gtgcttaaat tatttttata caccattgtt ccttaccttt |
| 2581 | acataattgc aatatttccc ccttactact tcttggaaaa aaattacaaa atgaagtttt |
| 2641 | aaaaaaaaaa aaaaaaaaaa aaaaaaaaa |
| 16. Pparg human DNA, Peroxisome Proliferator Activated Receptor Gamma | |
| (SEQ ID NO: 16) | |
| 1 | ccagaagcct gcatttctgc attctgctta attccctttc cttagatttg aaagaagcca |
| 61 | acactaaacc acaaatatac aacaaggcca ttttctcaaa cgagagtcag cctttaacga |
| 121 | aatgaccatg gttgacacag agatgccatt ctggcccacc aactttggga tcagctccgt |
| 181 | ggatctctcc gtaatggaag accactccca ctcctttgat atcaagccct tcactactgt |
| 241 | tgacttctcc agcatttcta ctccacatta cgaagacatt ccattcacaa gaacagatcc |
| 301 | agtggttgca gattacaagt atgacctgaa acttcaagag taccaaagtg caatcaaagt |
| 361 | ggagcctgca tctccacctt attattctga gaagactcag ctctacaata agcctcatga |
| 421 | agagccttcc aactccctca tggcaattga atgtcgtgtc tgtggagata aagcttctgg |
| 481 | atttcactat ggagttcatg cttgtgaagg atgcaagggt ttcttccgga gaacaatcag |
| 541 | attgaagctt atctatgaca gatgtgatct taactgtcgg atccacaaaa aaagtagaaa |
| 601 | taaatgtcag tactgtcggt ttcagaaatg ccttgcagtg gggatgtctc ataatgccat |
| 661 | caggtttggg cggatgccac aggccgagaa ggagaagctg ttggcggaga tctccagtga |
| 721 | tatcgaccag ctgaatccag agtccgctga cctccgggcc ctggcaaaac atttgtatga |
| 781 | ctcatacata aagtccttcc cgctgaccaa agcaaaggcg agggcgatct tgacaggaaa |
| 841 | gacaacagac aaatcaccat tcgttatcta tgacatgaat tccttaatga tgggagaaga |
| 901 | taaaatcaag ttcaaacaca tcacccccct gcaggagcag agcaaagagg tggccatccg |
| 961 | catctttcag ggctgccagt ttcgctccgt ggaggctgtg caggagatca cagagtatgc |
| 1021 | caaaagcatt cctggttttg taaatcttga cttgaacgac caagtaactc tcctcaaata |
| 1081 | tggagtccac gagatcattt acacaatgct ggcctccttg atgaataaag atggggttct |
| 1141 | catatccgag ggccaaggct tcatgacaag ggagtttcta aagagcctgc gaaagccttt |
| 1201 | tggtgacttt atggagccca agtttgagtt tgctgtgaag ttcaatgcac tggaattaga |
| 1261 | tgacagcgac ttggcaatat ttattgctgt cattattctc agtggagacc gcccaggttt |
| 1321 | gctgaatgtg aagcccattg aagacattca agacaacctg ctacaagccc tggagctcca |
| 1381 | gctgaagctg aaccaccctg agtcctcaca gctgtttgcc aagctgctcc agaaaatgac |
| 1441 | agacctcaga cagattgtca cggaacacgt gcagctactg caggtgatca agaagacgga |
| 1501 | gacagacatg agtcttcacc cgctcctgca ggagatctac aaggacttgt actagcagag |
| 1561 | agtcctgagc cactgccaac atttcccttc ttccagttgc actattctga gggaaaatct |
| 1621 | gacacctaag aaatttactg tgaaaaagca ttttaaaaag aaaaggtttt agaatatgat |
| 1681 | ctattttatg catattgttt ataaagacac atttacaatt tacttttaat attaaaaatt |
| 1741 | accatattat gaaaaaaaaa aaaaaaa |
| 17. Cisd2 human DNA, CDGSH Iron Sulfur Domain 2 | |
| (SEQ ID NO: 17) | |
| 1 | ccacgcgtcc gggctcggga gaggagtgga cgccgctggc caggatggtg ctggagagcg |
| 61 | tggcccgtat cgtgaaggtg cagctccctg catatctgaa gcggctccca gtccctgaaa |
| 121 | gcattaccgg gttcgctagg ctcacagttt cagaatggct tcggttattg cctttccttg |
| 181 | gtgtactcgc acttcttggc taccttgcag ttcgtccatt cctcccgaag aagaaacaac |
| 241 | agaaggatag cttgattaat cttaaaatac aaaaggaaaa tccgaaagta gtgaatgaaa |
| 301 | taaacattga agatttgtgt cttactaaag cagcttattg taggtgttgg cgttctaaaa |
| 361 | cgtttcctgc ctgcgatggt tcacataata aacacaatga attgacagga gataatgtgg |
| 421 | gtccactaat actgaagaag aaagaagtat aataataata acaatatttt ctcattcttt |
| 481 | gtgtatagaa aattttaaaa tggtggtctt aattattact actggttgaa caattatttc |
| 541 | ttccaattta ttttcttcct gcactactgt ttgtatttga tcctttgtct attcagtcac |
| 601 | ttaattagaa attaaattgt caagcctctt attctgactt caaagaatta atgtatcttc |
| 661 | caacaataaa atcacttctg attttaatct aggaaaacct aaattgtggc tatggatcca |
| 721 | aagctgtttg tttctttgaa tatcaatatt ttcaacagga tcttgtattt aaaattccca |
| 781 | cctacattgt taaatatgtt attttttcat atctcttttg gttttgataa tctgaagtgt |
| 841 | ttttttctcg ttttggcctt ccaaactgca tttggttagg tgaattaaga aaaatattgc |
| 901 | catcaagaat tacttgtgtt ttcacagaga tagactcttt gctttataga gattgttgtg |
| 961 | tatttaatat gaatatccca gctttagaaa agaagtaaac tggatacaaa aagttccatt |
| 1021 | gaggaacagt tatttacagt ataaaagatt tgtttacttt acaaaaggct tgtgtctgtg |
| 1081 | tgtgtgtgtg tgtgtgtgtg tgtgtgtatt ttaaactgac tcagtgacag ctggggtgga |
| 1141 | atggcaagaa cacttacaac caaactcatg ggctgctgca atttgaagat caattggtaa |
| 1201 | taaacataag acattaattc atattaaaat agttcagtgt tcaaaattgt gtttatgtgg |
| 1261 | atatttttct ctttttaaca ctataaacca ttaaaataca gtcatccctt gtatacgcta |
| 1321 | gggactggtt ccagggccac acatatacca aaatctgccc atactcaagt cccacagaaa |
| 1381 | gtcttgcaga acccatatgt agaaaagttg gccctccagt tgaccctccg tacacatgag |
| 1441 | tttcacatcc catgcacaaa tgctgatctg tgtgacctca cctgcatttg attgaaaaaa |
| 1501 | gtatgcgcgt aagtgtaccc acccagttca aacccgtgtg taagggtcaa ctgtacaaaa |
| 1561 | aagtttgtga aataaacgta ctggagaatc tttaaaaaaa aaaaaaaaaa aaaaaaa |
| 18. MDH1 human DNA, Malate Dehydrogenase 1 | |
| (SEQ ID NO: 18) | |
| 1 | ctgactctct gaggctcatt ttgcagttgt tgaaattgtc cccgcagttt tcaatcatgt |
| 61 | ctgaaccaat cagagtcctt gtgactggag cagctggtca aattgcatat tcactgctgt |
| 121 | acagtattgg aaatggatct gtctttggta aagatcagcc tataattctt gtgctgttgg |
| 181 | atatcacccc catgatgggt gtcctggacg gtgtcctaat ggaactgcaa gactgtgccc |
| 241 | ttcccctcct gaaagatgtc atcgcaacag ataaagaaga cgttgccttc aaagacctgg |
| 301 | atgtggccat tcttgtgggc tccatgccaa gaagggaagg catggagaga aaagatttac |
| 361 | tgaaagcaaa tgtgaaaatc ttcaaatccc agggtgcagc cttagataaa tacgccaaga |
| 421 | agtcagttaa ggttattgtt gtgggtaatc cagccaatac caactgcctg actgcttcca |
| 481 | agtcagctcc atccatcccc aaggagaact tcagttgctt gactcgtttg gatcacaacc |
| 541 | gagctaaagc tcaaattgct cttaaacttg gtgtgactgc taatgatgta aagaatgtca |
| 601 | ttatctgggg aaaccattcc tcgactcagt atccagatgt caaccatgcc aaggtgaaat |
| 661 | tgcaaggaaa ggaagttggt gtttatgaag ctctgaaaga tgacagctgg ctcaagggag |
| 721 | aatttgtcac gactgtgcag cagcgtggcg ctgctgtcat caaggctcga aaactatcca |
| 781 | gtgccatgtc tgctgcaaaa gccatctgtg accacgtcag ggacatctgg tttggaaccc |
| 841 | cagagggaga gtttgtgtcc atgggtgtta tctctgatgg caactcctat ggtgttcctg |
| 901 | atgatctgct ctactcattc cctgttgtaa tcaagaataa gacctggaag tttgttgaag |
| 961 | gtctccctat taatgatttc tcacgtgaga agatggatct tactgcaaag gaactgacag |
| 1021 | aagaaaaaga aagtgctttt gaatttcttt cctctgcctg actagacaat gatgttacta |
| 1081 | aatgcttcaa agctgaagaa tctaaatgtc gtctttgact caagtaccaa ataataataa |
| 1141 | tgctatactt aaattacttg tgaaaaacaa cacattttaa agattacgtg cttcttggta |
| 1201 | caggtttgtg aatgacagtt tatcgtcatg ctgttagtgt gcattctaaa taaatatata |
| 1261 | ttcaaatgaa aaaaaaaaaa aaaaaa |
| 19. MDH2 human DNA, Malate Dehydrogenase 2 | |
| (SEQ ID NO: 19) | |
| 1 | gccagtcggt gcccctcccg ctccagccat gctctccgcc ctcgcccggc ctgtcagcgc |
| 61 | tgctctccgc cgcagcttca gcacctcggc ccagaacaat gctaaagtag ctgtgctagg |
| 121 | ggcctctgga ggcatcgggc agccactttc acttctcctg aagaacagcc ccttggtgag |
| 181 | ccgcctgacc ctctatgata tcgcgcacac acccggagtg gccgcagatc tgagccacat |
| 241 | cgagaccaaa gccgctgtga aaggctacct cggacctgaa cagctgcctg actgcctgaa |
| 301 | aggttgtgat gtggtagtta ttccggctgg agtccccaga aagccaggca tgacccggga |
| 361 | cgacctgttc aacaccaatg ccacgattgt ggccaccctg accgctgcct gtgcccagca |
| 421 | ctgcccggaa gccatgatct gcgtcattgc caatccggtt aattccacca tccccatcac |
| 481 | agcagaagtt ttcaagaagc atggagtgta caaccccaac aaaatcttcg gcgtgacgac |
| 541 | cctggacatc gtcagagcca acacctttgt tgcagagctg aagggtttgg atccagctcg |
| 601 | agtcaacgtc cctgtcattg gtggccatgc tgggaagacc atcatccccc tgatctctca |
| 661 | gtgcaccccc aaggtggact ttccccagga ccagctgaca gcactcactg ggcggatcca |
| 721 | ggaggccggc acggaggtgg tcaaggctaa agccggagca ggctctgcca ccctctccat |
| 781 | ggcgtatgcc ggcgcccgct ttgtcttctc ccttgtggat gcaatgaatg gaaaggaagg |
| 841 | tgttgtggaa tgttccttcg ttaagtcaca ggaaacggaa tgtacctact tctccacacc |
| 901 | gctgctgctt gggaaaaagg gcatcgagaa gaacctgggc atcggcaaag tctcctcttt |
| 961 | tgaggagaag atgatctcgg atgccatccc cgagctgaag gcctccatca agaaggggga |
| 1021 | agatttcgtg aagaccctga agtgagccgc tgtgacgggt ggccagtttc cttaatttat |
| 1081 | gaaggcatca tgtcactgca aagccgttgc agataaactt tgtattttaa tttgctttgg |
| 1141 | tgatgattac tgtattgaca tcatcatgcc ttccaaattg tgggtggctc tgtgggcgca |
| 1201 | tcaataaaag ccgtccttga ttttaaaaaa aaaaaaaaaa aaaa |
| 20. Aco1 human DNA, Aconitase 1 | |
| (SEQ ID NO: 20) | |
| 1 | gccgtgcagt cggaggaaca cgtggccatc agtaatcatg agcaacccat tcgcacacct |
| 61 | tgctgagcca ttggatcctg tacaaccagg aaagaaattc ttcaatttga ataaattgga |
| 121 | ggattcaaga tatgggcgct taccattttc gatcagagtt cttctggaag cagccattcg |
| 181 | gaattgtgat gagtttttgg tgaagaaaca ggatattgaa aatattctac attggaatgt |
| 241 | cacgcagcac aagaacatag aagtgccatt taagcctgct cgtgtcatcc tgcaggactt |
| 301 | tacgggtgtg cccgctgtgg ttgactttgc tgcaatgcgt gatgctgtga aaaagttagg |
| 361 | aggagatcca gagaaaataa accctgtctg ccctgctgat cttgtaatag atcattccat |
| 421 | ccaggttgat ttcaacagaa gggcagacag tttacagaag aatcaagacc tggaatttga |
| 481 | aagaaataga gagcgatttg aatttttaaa gtggggttcc caggcttttc acaacatgcg |
| 541 | gattattccc cctggctcag gaatcatcca ccaggtgaat ttggaatatt tggcaagagt |
| 601 | ggtatttgat caggatggat attattaccc agacagcctc gtgggcacag actcgcacac |
| 661 | taccatgatt gatggcttgg gcattcttgg ttggggtgtc ggtggtattg aagcagaagc |
| 721 | tgtcatgctg ggtcagccaa tcagtatggt gcttcctcag gtgattggct acaggctgat |
| 781 | ggggaagccc caccctctgg taacatccac tgacatcgtg ctcaccatta ccaagcacct |
| 841 | ccgccaggtt ggggtagtgg gcaaatttgt cgagttcttc gggcctggag tagcccagtt |
| 901 | gtccattgct gaccgagcta cgattgctaa catgtgtcca gagtacggag caactgctgc |
| 961 | ctttttccca gttgatgaag ttagtatcac gtacctggtg caaacaggtc gtgatgaaga |
| 1021 | aaaattaaag tatattaaaa aatatcttca ggctgtagga atgtttcgag atttcaatga |
| 1081 | cccttctcaa gacccagact tcacccaggt tgtggaatta gatttgaaaa cagtagtgcc |
| 1141 | ttgctgtagt ggacccaaaa ggcctcagga caaagttgct gtgtccgaca tgaaaaagga |
| 1201 | ctttgagagc tgccttggag ccaagcaagg atttaaagga ttccaagttg ctcctgaaca |
| 1261 | tcataatgac cataagacct ttatctatga taacactgaa ttcacccttg ctcatggttc |
| 1321 | tgtggtcatt gctgccatta ctagctgcac aaacaccagt aatccgtctg tgatgttagg |
| 1381 | ggcaggattg ttagcaaaga aagctgtgga tgctggcctg aacgtgatgc cttacatcaa |
| 1441 | aactagcctg tctcctggga gtggcgtggt cacctactac ctacaagaaa gcggagtcat |
| 1501 | gccttatctg tctcagcttg ggtttgacgt ggtgggctat ggctgcatga cctgcattgg |
| 1561 | caacagtggg cctttacctg aacctgtggt agaagccatc acacagggag accttgtagc |
| 1621 | tgttggagta ctatctggaa acaggaattt tgaaggtcga gttcacccca acacccgggc |
| 1681 | caactattta gcctctcccc ccttagtaat agcatatgca attgctggaa ccatcagaat |
| 1741 | cgactttgag aaagagccat tgggagtaaa tgcaaaggga cagcaggtat ttctgaaaga |
| 1801 | tatctggccg actagagacg agatccaggc agtggagcgt cagtatgtca tcccggggat |
| 1861 | gtttaaggaa gtctatcaga aaatagagac tgtgaatgaa agctggaatg ccttagcaac |
| 1921 | cccatcagat aagctgtttt tctggaattc caaatctacg tatatcaaat caccaccatt |
| 1981 | ctttgaaaac ctgactttgg atcttcagcc ccctaaatct atagtggatg cctatgtgct |
| 2041 | gctaaatttg ggagattcgg taacaactga ccacatctcc ccagctggaa atattgcaag |
| 2101 | aaacagtcct gctgctcgct acttaactaa cagaggccta actccacgag aattcaactc |
| 2161 | ctatggctcc cgccgaggta atgacgccgt catggcacgg ggaacatttg ccaacattcg |
| 2221 | cttgttaaac agatttttga acaagcaggc accacagact atccatctgc cttctgggga |
| 2281 | aatccttgat gtgtttgatg ctgctgagcg gtaccagcag gcaggccttc ccctgatcgt |
| 2341 | tctggctggc aaagagtacg gtgcaggcag ctcccgagac tgggcagcta agggcccttt |
| 2401 | cctgctggga atcaaagccg tcctggccga gagctacgag cgcattcacc gcagtaacct |
| 2461 | ggttgggatg ggtgtgatcc cacttgaata tctccctggt gagaatgcag atgccctggg |
| 2521 | gctcacaggg caagaacgat acactatcat tattccagaa aacctcaaac cacaaatgaa |
| 2581 | agtccaggtc aagctggata ctggcaagac cttccaggct gtcatgaggt ttgacactga |
| 2641 | tgtggagctc acttatttcc tcaacggggg catcctcaac tacatgatcc gcaagatggc |
| 2701 | caagtaggag acgtgcactt ggtgctgcgc ccagggagga agccgcacca ccagccagcg |
| 2761 | caggccctgg tggagaggcc tccctggctg cctctgggag gggtgctgcc ttgtagatgg |
| 2821 | agcaagtgag cactgagggt ctggtgccaa tcctgtaggc acaaaaccag aagtttctac |
| 2881 | attctctatt tttgttaatc atcttctctt tttccagaat ttggaagcta gaatggtggg |
| 2941 | aatgtcagta gtgccagaaa gagagaacca agcttgtctt taaagttact gatcacagga |
| 3001 | cgttgctttt tcactgtttc ctattaatct tcagctgaac acaagcaaac cttctcagga |
| 3061 | ggtgtctcct accctcttat tgttcctctt acgctctgct caatgaaacc ttcctcttga |
| 3121 | gggtcatttt cctttctgta ttaattatac cagtgttaag tgacatagat aagaactttg |
| 3181 | cacacttcaa atcagagcag tgattctctc ttctctcccc ttttccttca gagtgaatca |
| 3241 | tccagactcc tcatggatag gtcgggtgtt aaagttgttt tgattatgta ccttttgata |
| 3301 | gatccacata aaaagaaatg tgaagttttc ttttactatc ttttcattta tcaagcagag |
| 3361 | acctttgttg ggaggcggtt tgggagaaca catttctaat ttgaatgaaa tgaaatctat |
| 3421 | tttcagtgaa aaaaaaaaaa aaa |
| 21. Aco2 human DNA, Aconitase 2 | |
| (SEQ ID NO: 21) | |
| 1 | gtcctcatct ttgtcagtgc acaaaatggc gccctacagc ctactggtga ctcggctgca |
| 61 | gaaagctctg ggtgtgcggc agtaccatgt ggcctcagtc ctgtgccaac gggccaaggt |
| 121 | ggcgatgagc cactttgagc ccaacgagta catccattat gacctgctag agaagaacat |
| 181 | taacattgtt cgcaaacgac tgaaccggcc gctgacactc tcggagaaga ttgtgtatgg |
| 241 | acacctggat gaccccgcca gccaggaaat tgagcgaggc aagtcgtacc tgcggctgcg |
| 301 | gccggaccgt gtggccatgc aggatgcgac ggcccagatg gccatgctcc agttcatcag |
| 361 | cagcgggctg tccaaggtgg ctgtgccatc caccatccac tgtgaccatc tgattgaagc |
| 421 | ccaggttggg ggcgagaaag acctgcgccg ggccaaggac atcaaccagg aagtttataa |
| 481 | tttcctggca actgcaggtg ccaaatatgg cgtgggcttc tggaagcctg gatctggaat |
| 541 | cattcaccag attattctgg aaaactatgc gtaccctggt gttcttctga ttggcactga |
| 601 | ctcccacacc cccaatggtg gcggccttgg gggcatctgc attcgagttg ggggtgccga |
| 661 | tgctgtggat gtcatggctg ggatcccctg ggagttgaag tgccccaagg tgattggcgt |
| 721 | gaagctgacg ggctctctct ccggttggtc ctcacccaaa gatgtgatcc tgaaggtggc |
| 781 | aggcatcctc acggtgaaag gtggcacagg tgcaatcgtg gaataccacg ggcatggtgt |
| 841 | agactccatc tcctgcactg gcatggcgac aatctgcaac atgggtgcag aaattggggc |
| 901 | caccacttcc gtgttccctt acaaccacag gatgaagaag tacctgagca agaccggccg |
| 961 | ggaagacatt gccaatctag ctgatgaatt caaggatcac ttggtgcctg accctggctg |
| 1021 | ccattatgac caactaattg aaattaacct cagtgagctg aagccacaca tcaatgggcc |
| 1081 | cttcacccct gacctggctc accctgtggc agaagtgggc aaggtggcag agaaggaagg |
| 1141 | atggcctctg gacatccgag tgggtctaat tggtagctgc accaattcaa gctatgaaga |
| 1201 | tatggggcgc tcagcagctg tggccaagca ggcactggcc catggcctca agtgcaagtc |
| 1261 | ccagttcacc atcactccag gttccgagca gatccgcgcc accattgagc gggacggcta |
| 1321 | tgcacagatc ttgagggatc tgggtggcat tgtcctggcc aatgcttgtg gcccctgcat |
| 1381 | tggccagtgg gacaggaagg acatcaagaa gggggagaag aacacaatcg tcacctcgta |
| 1441 | caacaggaac ttcacgggcc gcaacgacgc aaaccccgag acccatgcct ttgtcacgtc |
| 1501 | cccagagatt gtcacagccc tggccattgc gggaaccctc aagttcaacc cagagaccga |
| 1561 | ctacctgacg ggcacggatg gcaagaagtt caggctggag gctccggatg cagatgagct |
| 1621 | tcccaaaggg gagtttgacc cagggcagga cacctaccag cacccaccca aggacagcag |
| 1681 | cgggcagcat gtggacgtga gccccaccag ccagcgcctg cagctcctgg agccttttga |
| 1741 | caagtgggat ggcaaggacc tggaggacct gcagatcctc atcaaggtca aagggaagtg |
| 1801 | taccactgac cacatctcag ctgctggccc ctggctcaag ttccgtgggc acttggataa |
| 1861 | catctccaac aacctgctca ttggtgccat caacattgaa aacggcaagg ccaactccgt |
| 1921 | gcgcaatgcc gtcactcagg agtttggccc cgtccctgac actgcccgct actacaagaa |
| 1981 | acatggcatc aggtgggtgg tgatcggaga cgagaactac ggcgagggct cgagccggga |
| 2041 | gcatgcagct ctggagcctc gccaccttgg gggccgggcc atcatcacca agagctttgc |
| 2101 | caggatccac gagaccaacc tgaagaaaca gggcctgctg cctctgacct tcgctgaccc |
| 2161 | ggctgactac aacaagattc accctgtgga caagctgacc attcagggcc tgaaggactt |
| 2221 | cacccctggc aagcccctga agtgcatcat caagcacccc aacgggaccc aggagaccat |
| 2281 | cctcctgaac cacaccttca acgagacgca gattgagtgg ttccgcgctg gcagtgccct |
| 2341 | caacagaatg aaggaactgc aacagtgagg gcagtgcctc cccgccccgc cgctggcgtc |
| 2401 | aagttcagct ccacgtgtgc catcagtgga tccgatccgt ccagccatgg cttcctattc |
| 2461 | caagatggtg tgaccagaca tgcttcctgc tccccgctta gcccacggag tgactgtggt |
| 2521 | tgtggtgggg gggttcttaa aataactttt tagcccccat cttcctattt tgagtttggt |
| 2581 | tcagatctta agcagctcca tgcaactgta tttatttttg atgacaagac tcccatctaa |
| 2641 | agtttttctc ctgcctgatc atttcattgg tggctgaagg attctagaga accttttgtt |
| 2701 | cttgcaagga aaacaagaat ccaaaaccaa aaaaaaaaaa aaaaa |
| 22. IDH1 human DNA, Isocitrate Dehydrogenase (NADP(+)) 1, Cytosolic | |
| (SEQ ID NO: 22) | |
| 1 | ggcggcgaag cgggggcacg ccctcgcaca cgcagagata aattgtgctc ccatgacctt |
| 61 | tatttggaaa gtgcctgcgg gcctaaaatt ggcctttgtc ccaccgagta cactcagcac |
| 121 | tgtactttaa accggataaa ctgggctgtc tggcaggcga taaactacat tcagttgagt |
| 181 | ctgcaagact gggaggaact ggggtgataa gaaatctatt cactgtcaag gtttattgaa |
| 241 | gtcaaaatgt ccaaaaaaat cagtggcggt tctgtggtag agatgcaagg agatgaaatg |
| 301 | acacgaatca tttgggaatt gattaaagag aaactcattt ttccctacgt ggaattggat |
| 361 | ctacatagct atgatttagg catagagaat cgtgatgcca ccaacgacca agtcaccaag |
| 421 | gatgctgcag aagctataaa gaagcataat gttggcgtca aatgtgccac tatcactcct |
| 481 | gatgagaaga gggttgagga gttcaagttg aaacaaatgt ggaaatcacc aaatggcacc |
| 541 | atacgaaata ttctgggtgg cacggtcttc agagaagcca ttatctgcaa aaatatcccc |
| 601 | cggcttgtga gtggatgggt aaaacctatc atcataggtc gtcatgctta tggggatcaa |
| 661 | tacagagcaa ctgattttgt tgttcctggg cctggaaaag tagagataac ctacacacca |
| 721 | agtgacggaa cccaaaaggt gacatacctg gtacataact ttgaagaagg tggtggtgtt |
| 781 | gccatgggga tgtataatca agataagtca attgaagatt ttgcacacag ttccttccaa |
| 841 | atggctctgt ctaagggttg gcctttgtat ctgagcacca aaaacactat tctgaagaaa |
| 901 | tatgatgggc gttttaaaga catctttcag gagatatatg acaagcagta caagtcccag |
| 961 | tttgaagctc aaaagatctg gtatgagcat aggctcatcg acgacatggt ggcccaagct |
| 1021 | atgaaatcag agggaggctt catctgggcc tgtaaaaact atgatggtga cgtgcagtcg |
| 1081 | gactctgtgg cccaagggta tggctctctc ggcatgatga ccagcgtgct ggtttgtcca |
| 1141 | gatggcaaga cagtagaagc agaggctgcc cacgggactg taacccgtca ctaccgcatg |
| 1201 | taccagaaag gacaggagac gtccaccaat cccattgctt ccatttttgc ctggaccaga |
| 1261 | gggttagccc acagagcaaa gcttgataac aataaagagc ttgccttctt tgcaaatgct |
| 1321 | ttggaagaag tctctattga gacaattgag gctggcttca tgaccaagga cttggctgct |
| 1381 | tgcattaaag gtttacccaa tgtgcaacgt tctgactact tgaatacatt tgagttcatg |
| 1441 | gataaacttg gagaaaactt gaagatcaaa ctagctcagg ccaaacttta agttcatacc |
| 1501 | tgagctaaga aggataattg tcttttggta actaggtcta caggtttaca tttttctgtg |
| 1561 | ttacactcaa ggataaaggc aaaatcaatt ttgtaatttg tttagaagcc agagtttatc |
| 1621 | ttttctataa gtttacagcc tttttcttat atatacagtt attgccacct ttgtgaacat |
| 1681 | ggcaagggac ttttttacaa tttttatttt attttctagt accagcctag gaattcggtt |
| 1741 | agtactcatt tgtattcact gtcacttttt ctcatgttct aattataaat gaccaaaatc |
| 1801 | aagattgctc aaaagggtaa atgatagcca cagtattgct ccctaaaata tgcataaagt |
| 1861 | agaaattcac tgccttcccc tcctgtccat gaccttgggc acagggaagt tctggtgtca |
| 1921 | tagatatccc gttttgtgag gtagagctgt gcattaaact tgcacatgac tggaacgaag |
| 1981 | tatgagtgca actcaaatgt gttgaagata ctgcagtcat ttttgtaaag accttgctga |
| 2041 | atgtttccaa tagactaaat actgtttagg ccgcaggaga gtttggaatc cggaataaat |
| 2101 | actacctgga ggtttgtcct ctccattttt ctctttctcc tcctggcctg gcctgaatat |
| 2161 | tatactactc taaatagcat atttcatcca agtgcaataa tgtaagctga atcttttttg |
| 2221 | gacttctgct ggcctgtttt atttctttta tataaatgtg atttctcaga aattgatatt |
| 2281 | aaacactatc ttatcttctc ctgaaaaaaa aaaaaaaaaa aaaaaa |
| 23. IDH2 human DNA, Isocitrate Dehydrogenase (NADP(+)) 2, | |
| Mitochondrial | |
| (SEQ ID NO: 23) | |
| 1 | ggcagccggg aggagcggcg cgcgctcgga cctctcccgc cctgctcgtt cgctctccag |
| 61 | cttgggatgg ccggctacct gcgggtcgtg cgctcgctct gcagagcctc aggctcgcgg |
| 121 | ccggcctggg cgccggcggc cctgacagcc cccacctcgc aagagcagcc gcggcgccac |
| 181 | tatgccgaca aaaggatcaa ggtggcgaag cccgtggtgg agatggatgg tgatgagatg |
| 241 | acccgtatta tctggcagtt catcaaggag aagctcatcc tgccccacgt ggacatccag |
| 301 | ctaaagtatt ttgacctcgg gctcccaaac cgtgaccaga ctgatgacca ggtcaccatt |
| 361 | gactctgcac tggccaccca gaagtacagt gtggctgtca agtgtgccac catcacccct |
| 421 | gatgaggccc gtgtggaaga gttcaagctg aagaagatgt ggaaaagtcc caatggaact |
| 481 | atccggaaca tcctgggggg gactgtcttc cgggagccca tcatctgcaa aaacatccca |
| 541 | cgcctagtcc ctggctggac caagcccatc accattggca ggcacgccca tggcgaccag |
| 601 | tacaaggcca cagactttgt ggcagaccgg gccggcactt tcaaaatggt cttcacccca |
| 661 | aaagatggca gtggtgtcaa ggagtgggaa gtgtacaact tccccgcagg cggcgtgggc |
| 721 | atgggcatgt acaacaccga cgagtccatc tcaggttttg cgcacagctg cttccagtat |
| 781 | gccatccaga agaaatggcc gctgtacatg agcaccaaga acaccatact gaaagcctac |
| 841 | gatgggcgtt tcaaggacat cttccaggag atctttgaca agcactataa gaccgacttc |
| 901 | gacaagaata agatctggta tgagcaccgg ctcattgatg acatggtggc tcaggtcctc |
| 961 | aagtcttcgg gtggctttgt gtgggcctgc aagaactatg acggagatgt gcagtcagac |
| 1021 | atcctggccc agggctttgg ctcccttggc ctgatgacgt ccgtcctggt ctgccctgat |
| 1081 | gggaagacga ttgaggctga ggccgctcat gggaccgtca cccgccacta tcgggagcac |
| 1141 | cagaagggcc ggcccaccag caccaacccc atcgccagca tctttgcctg gacacgtggc |
| 1201 | ctggagcacc gggggaagct ggatgggaac caagacctca tcaggtttgc ccagatgctg |
| 1261 | gagaaggtgt gcgtggagac ggtggagagt ggagccatga ccaaggacct ggcgggctgc |
| 1321 | attcacggcc tcagcaatgt gaagctgaac gagcacttcc tgaacaccac ggacttcctc |
| 1381 | gacaccatca agagcaacct ggacagagcc ctgggcaggc agtaggggga ggcgccaccc |
| 1441 | atggctgcag tggaggggcc agggctgagc cggcgggtcc tcctgagcgc ggcagagggt |
| 1501 | gagcctcaca gcccctctct ggaggccttt ctaggggatg tttttttata agccagatgt |
| 1561 | ttttaaaagc atatgtgtgt ttcccctcat ggtgacgtga ggcaggagca gtgcgtttta |
| 1621 | cctcagccag tcagtatgtt ttgcatactg taatttatat tgcccttgga acacatggtg |
| 1681 | ccatatttag ctactaaaaa gctcttcaca aaaaaaaaaa aaaaaaa |
| 24. IDH3A human DNA, Isocitrate Dehydrogenase 3 (NAD(+)) Alpha | |
| (SEQ ID NO: 24) | |
| 1 | cggagccagg aggggaagcg atggctgggc ccgcgtggat ctctaaggtc tctcggctgc |
| 61 | tgggggcatt ccacaaccca aaacaggtga ccagaggttt tactggtggt gttcagacag |
| 121 | taactttaat tccaggagat ggtattggcc cagaaatttc agctgcagtt atgaagattt |
| 181 | ttgatgctgc caaagcacct attcagtggg aggagcggaa cgtcactgcc attcaaggac |
| 241 | ctggaggaaa gtggatgatc ccttcagagg ctaaagagtc catggataag aacaagatgg |
| 301 | gcttgaaagg ccctttgaag accccaatag cagccggtca cccatctatg aatttactgc |
| 361 | tgcgcaaaac atttgacctt tacgcgaatg tccgaccatg tgtctctatc gaaggctata |
| 421 | aaacccctta caccgatgta aatattgtga ccattcgaga gaacacagaa ggagaataca |
| 481 | gtggaattga gcatgtgatt gttgatggag tcgtgcagag tatcaagctc atcaccgagg |
| 541 | gggcgagcaa gcgcattgct gagtttgcct ttgagtatgc ccggaacaac caccggagca |
| 601 | acgtcacggc ggtgcacaaa gccaacatca tgcggatgtc agatgggctt tttctacaaa |
| 661 | aatgcaggga agttgcagaa agctgtaaag atattaaatt taatgagatg taccttgata |
| 721 | cagtatgttt gaatatggta caagatcctt cccaatttga tgttcttgtt atgccaaatt |
| 781 | tgtatggaga catccttagt gacttgtgtg caggattgat cggaggtctc ggtgtgacac |
| 841 | caagtggcaa cattggagcc aatggggttg caatttttga gtcggttcat gggacggctc |
| 901 | cagacattgc aggcaaggac atggcgaatc ccacagccct cctgctcagt gccgtgatga |
| 961 | tgctgcgcca catgggactt tttgaccatg ctgcaagaat tgaggctgcg tgttttgcta |
| 1021 | caattaagga cggaaagagc ttgacaaaag atttgggagg caatgcaaaa tgctcagact |
| 1081 | tcacagagga aatctgtcgc cgagtaaaag atttagatta acacttctac aactggcatt |
| 1141 | tacatcagtc actctaaatg gacaccacat gaacctctgt ttagaatacc tacgtatgta |
| 1201 | tgcattggtt tgcttgtttc ttgacagtac atttttagat ctggcctttt cttaacaaaa |
| 1261 | tctgtgcaaa agatgcaggt ggatgtccct aggtctgttt tcaaagaact ttttccaagt |
| 1321 | gcttgtttta tttattaagt gtctacctgg taaatgtttt ttttgtaaac tctgagtgga |
| 1381 | ctgtatcatt tgctattcta aaccatttta cacttaagtt aaaatagttt ctcttcagct |
| 1441 | gtaaataaca ggatacagaa ttaacaagag aaaatgtcta actttttaag aaaaacctta |
| 1501 | ttttcttcgg tttttgaaaa acataatgga aataaaacag gatattgaca taatagcaca |
| 1561 | aaatgacact cttctaaaac taaatgggca caagagaatt ttcctgggaa agttcacatc |
| 1621 | aaaaagagtg aatgtggtat atttctaaat gatatggaaa atagagacag atttgtcctt |
| 1681 | tacagaaatt actgagtgtg aataaaaact tcagatccaa gaaatatata atgagagata |
| 1741 | taatttttgt taataagaca aaggtaatat attggataca aagacaaaaa aaaaaaaaaa |
| 1801 | aaa |
| 25. ENO1 human DNA, Enolase 1 | |
| (SEQ ID NO: 25) | |
| 1 | cacggagatc tcgccggctt tacgttcacc tcggtgtctg cagcaccctc cgcttcctct |
| 61 | cctaggcgac gagacccagt ggctagaagt tcaccatgtc tattctcaag atccatgcca |
| 121 | gggagatctt tgactctcgc gggaatccca ctgttgaggt tgatctcttc acctcaaaag |
| 181 | gtctcttcag agctgctgtg cccagtggtg cttcaactgg tatctatgag gccctagagc |
| 241 | tccgggacaa tgataagact cgctatatgg ggaagggtgt ctcaaaggct gttgagcaca |
| 301 | tcaataaaac tattgcgcct gccctggtta gcaagaaact gaacgtcaca gaacaagaga |
| 361 | agattgacaa actgatgatc gagatggatg gaacagaaaa taaatctaag tttggtgcga |
| 421 | acgccattct gggggtgtcc cttgccgtct gcaaagctgg tgccgttgag aagggggtcc |
| 481 | ccctgtaccg ccacatcgct gacttggctg gcaactctga agtcatcctg ccagtcccgg |
| 541 | cgttcaatgt catcaatggc ggttctcatg ctggcaacaa gctggccatg caggagttca |
| 601 | tgatcctccc agtcggtgca gcaaacttca gggaagccat gcgcattgga gcagaggttt |
| 661 | accacaacct gaagaatgtc atcaaggaga aatatgggaa agatgccacc aatgtggggg |
| 721 | atgaaggcgg gtttgctccc aacatcctgg agaataaaga aggcctggag ctgctgaaga |
| 781 | ctgctattgg gaaagctggc tacactgata aggtggtcat cggcatggac gtagcggcct |
| 841 | ccgagttctt caggtctggg aagtatgacc tggacttcaa gtctcccgat gaccccagca |
| 901 | ggtacatctc gcctgaccag ctggctgacc tgtacaagtc cttcatcaag gactacccag |
| 961 | tggtgtctat cgaagatccc tttgaccagg atgactgggg agcttggcag aagttcacag |
| 1021 | ccagtgcagg aatccaggta gtgggggatg atctcacagt gaccaaccca aagaggatcg |
| 1081 | ccaaggccgt gaacgagaag tcctgcaact gcctcctgct caaagtcaac cagattggct |
| 1141 | ccgtgaccga gtctcttcag gcgtgcaagc tggcccaggc caatggttgg ggcgtcatgg |
| 1201 | tgtctcatcg ttcgggggag actgaagata ccttcatcgc tgacctggtt gtggggctgt |
| 1261 | gcactgggca gatcaagact ggtgcccctt gccgatctga gcgcttggcc aagtacaacc |
| 1321 | agctcctcag aattgaagag gagctgggca gcaaggctaa gtttgccggc aggaacttca |
| 1381 | gaaacccctt ggccaagtaa gctgtgggca ggcaagccct tcggtcacct gttggctaca |
| 1441 | cagacccctc ccctcgtgtc agctcaggca gctcgaggcc cccgaccaac acttgcaggg |
| 1501 | gtccctgcta gttagcgccc caccgccgtg gagttcgtac cgcttcctta gaacttctac |
| 1561 | agaagccaag ctccctggag ccctgttggc agctctagct ttgcagtcgt gtaattggcc |
| 1621 | caagtcattg tttttctcgc ctcactttcc accaagtgtc tagagtcatg tgagcctcgt |
| 1681 | gtcatctccg gggtggccac aggctagatc cccggtggtt ttgtgctcaa aataaaaagc |
| 1741 | ctctgtgacc catgaaaaaa aaaaaaaaaa |
| 26. GOT1 human DNA, Glutamic-Oxaloacetic Transaminase 1 | |
| (SEQ ID NO: 26) | |
| 1 | gaaatctctt gattcctagt ctctcgatat ggcacctccg tcagtctttg ccgaggttcc |
| 61 | gcaggcccag cctgtcctgg tcttcaagct cactgccgac ttcagggagg atccggaccc |
| 121 | ccgcaaggtc aacctgggag tgggagcata tcgcacggat gactgccatc cctgggtttt |
| 181 | gccagtagtg aagaaagtgg agcagaagat tgctaatgac aatagcctaa atcacgagta |
| 241 | tctgccaatc ctgggcctgg ctgagttccg gagctgtgct tctcgtcttg cccttgggga |
| 301 | tgacagccca gcactcaagg agaagcgggt aggaggtgtg caatctttgg ggggaacagg |
| 361 | tgcacttcga attggagctg atttcttagc gcgttggtac aatggaacaa acaacaagaa |
| 421 | cacacctgtc tatgtgtcct caccaacctg ggagaatcac aatgctgtgt tttccgctgc |
| 481 | tggttttaaa gacattcggt cctatcgcta ctgggatgca gagaagagag gattggacct |
| 541 | ccagggcttc ctgaatgatc tggagaatgc tcctgagttc tccattgttg tcctccacgc |
| 601 | ctgtgcacac aacccaactg ggattgaccc aactccggag cagtggaagc agattgcttc |
| 661 | tgtcatgaag caccggtttc tgttcccctt ctttgactca gcctatcagg gcttcgcatc |
| 721 | tggaaacctg gagagagatg cctgggccat tcgctatttt gtgtctgaag gcttcgagtt |
| 781 | cttctgtgcc cagtccttct ccaagaactt cgggctctac aatgagagag tcgggaatct |
| 841 | gactgtggtt ggaaaagaac ctgagagcat cctgcaagtc ctttcccaga tggagaagat |
| 901 | cgtgcggatt acttggtcca atccccccgc ccagggagca cgaattgtgg ccagcaccct |
| 961 | ctctaaccct gagctctttg aggaatggac aggtaatgtg aagacaatgg ctgaccggat |
| 1021 | tctgaccatg agatctgaac tcagggcacg actagaagcc ctcaaaaccc ctgggacctg |
| 1081 | gaaccacatc actgatcaaa ttggcatgtt cagcttcact gggttgaacc ccaagcaggt |
| 1141 | tgagtatctg gtcaatgaaa agcacatcta cctgctgcca agtggtcgaa tcaacgtgag |
| 1201 | tggcttaacc accaaaaatc tagattacgt ggccacctcc atccatgaag cagtcaccaa |
| 1261 | aatccagtga agaaacacca cccgtccagt accaccaaag tagttctctg tcatgtgtgt |
| 1321 | tccctgcctg cacaaaccta catgtacata ccatggatta gagacacttg caggactgaa |
| 1381 | aggctgctct ggtgaggcag cctctgttta aaccggcccc acatgaagag aacatccctt |
| 1441 | gagacgaatt tggagactgg gattagagcc tttggaggtc aaagcaaatt aagattttta |
| 1501 | tttaagaata aaagagtact ttgatcatga gaaaaaaaac aaaaaaaaaa aaaaaaaaaa |
| 1561 | aaaaaa |
| 27. GOT2 human DNA, Glutamic-Oxaloacetic Transaminase 2 | |
| (SEQ ID NO: 27) | |
| 1 | gctcgccctc tgctccgtcc tgcggctgcc cactgccctc ctacggtcca ccatggccct |
| 61 | gctgcactcc ggccgcgtcc tccccgggat cgccgccgcc ttccacccgg gcctcgccgc |
| 121 | cgcggcctct gccagagcca gctcctggtg gacccatgtg gaaatgggac ctccagatcc |
| 181 | cattctggga gtcactgaag cctttaagag ggacaccaat agcaaaaaga tgaatctggg |
| 241 | agttggtgcc taccgggatg ataatggaaa gccttacgtt ctgcctagcg tccgcaaggc |
| 301 | agaggcccag attgccgcaa aaaatttgga caaggaatac ctgcccattg ggggactggc |
| 361 | tgaattttgc aaggcatctg cagaactagc cctgggtgag aacagcgaag tcttgaagag |
| 421 | tggccggttt gtcactgtgc agaccatttc tggaactgga gccttaagga tcggagccag |
| 481 | ttttctgcaa agatttttta agttcagccg agatgtcttt ctgcccaaac caacctgggg |
| 541 | aaaccacaca cccatcttca gggatgctgg catgcagcta caaggttatc ggtattatga |
| 601 | ccccaagact tgcggttttg acttcacagg cgctgtggag gatatttcaa aaataccaga |
| 661 | gcagagtgtt cttcttctgc atgcctgcgc ccacaatccc acgggagtgg acccgcgtcc |
| 721 | ggaacagtgg aaggaaatag caacagtggt gaagaaaagg aatctctttg cgttctttga |
| 781 | catggcctac caaggctttg ccagtggtga tggtgataag gatgcctggg ctgtgcgcca |
| 841 | cttcatcgaa cagggcatta atgtttgcct ctgccaatca tatgccaaga acatgggctt |
| 901 | atatggtgag cgtgtaggag ccttcactat ggtctgcaaa gatgcggatg aagccaaaag |
| 961 | ggtagagtca cagttgaaga tcttgatccg tcccatgtat tccaaccctc ccctcaatgg |
| 1021 | ggcccggatt gctgctgcca ttctgaacac cccagatttg cgaaaacaat ggctgcaaga |
| 1081 | agtgaaagtc atggctgacc gcatcattgg catgcggact caactggtct ccaacctcaa |
| 1141 | gaaggagggt tccacccaca attggcaaca catcaccgac caaattggca tgttctgttt |
| 1201 | cacagggcta aagcctgaac aggtggagcg gctgatcaag gagttctcca tctacatgac |
| 1261 | aaaagatggc cgcatctctg tggcaggggt cacctccagc aacgtgggct accttgccca |
| 1321 | tgccattcac caggccacca agtaatgtcc ctggtgcgag gaaacagaga caacctttct |
| 1381 | gtcttcagcc tctgctattg agagcttcac acagacaatg agagagggtg gatggtggtg |
| 1441 | agtggatcat ttctttcagc cacagtgtgt aacactcagc atttgaatgt ttctcagaaa |
| 1501 | agaacatgta gtgacacagg gcagaggcat ccatggctgg cgtctggaat attaaaccaa |
| 1561 | actctccccg gtcctttttt ctccaacttt tctcaaagag tttacatgtg caagaaagtc |
| 1621 | atcgcaccaa aaaacctgtc aattatgcca ttgcaatatt tcagaagctt taactgaagt |
| 1681 | gtcaggttcc tcgtgagaaa cagcacacgt tagaggcttt gagagaaggc ctagttctgt |
| 1741 | catgagtagt cggcctcgtg tctgtcctcc catcttggaa caaccttatc aacaggccgc |
| 1801 | actgcagaaa tgatgtttta tgaaaaccaa tgaggctgct gccactccag caagggaaat |
| 1861 | aatgcagttt cctgtcttat ttaagaaaaa gagaaggctc tcttttctcc cttgtcattg |
| 1921 | ccgttctttt ccttacacgc aaagattttt taactattgc agattttcat cccattctac |
| 1981 | tgcttgattg accatcaact ccatcctatc gagatttatt taagaatgaa gaacataatt |
| 2041 | ttctgctgat gctgtaccct cacccttttc agcaaagaat agtggagagt aggaaactgt |
| 2101 | actttatctc ggcatcctct tgaatgatag tgcaagtttc tccagttggg atgttgtctc |
| 2161 | tgcccggttg gacctcctcc ctttgttgaa tgtggtgtgc agcctctcat ctcacactgt |
| 2221 | gagtccagcg gcgcagggtg gtaccaggaa agaggatatt ctaggctttg cgtgctgcta |
| 2281 | gctgggttca ggcttcaccc actggaaaga accaccatct gctctaacca tgtagactta |
| 2341 | ttgcggcctg gtttctctgt tacaataaaa ttactgtaga cccaaaaaaa aaaaaaaaaa |
| 2401 | aaaaaaaaaa a |
| 28. MUC1 human DNA, Mucin 1, Cell Surface Associated | |
| (SEQ ID NO: 28) | |
| 1 | cgcctgcctg aatctgttct gccccctccc cacccatttc accaccacca tgacaccggg |
| 61 | cacccagtct cctttcttcc tgctgctgct cctcacagtg cttacagcta ccacagcccc |
| 121 | taaacccgca acagttgtta cgggttctgg tcatgcaagc tctaccccag gtggagaaaa |
| 181 | ggagacttcg gctacccaga gaagttcagt gcccagctct actgagaaga atgcttttaa |
| 241 | ttcctctctg gaagatccca gcaccgacta ctaccaagag ctgcagagag acatttctga |
| 301 | aatgtttttg cagatttata aacaaggggg ttttctgggc ctctccaata ttaagttcag |
| 361 | gccaggatct gtggtggtac aattgactct ggccttccga gaaggtacca tcaatgtcca |
| 421 | cgacgtggag acacagttca atcagtataa aacggaagca gcctctcgat ataacctgac |
| 481 | gatctcagac gtcagcgtga gtgatgtgcc atttcctttc tctgcccagt ctggggctgg |
| 541 | ggtgccaggc tggggcatcg cgctgctggt gctggtctgt gttctggttg cgctggccat |
| 601 | tgtctatctc attgccttgg ctgtctgtca gtgccgccga aagaactacg ggcagctgga |
| 661 | catctttcca gcccgggata cctaccatcc tatgagcgag taccccacct accacaccca |
| 721 | tgggcgctat gtgcccccta gcagtaccga tcgtagcccc tatgagaagg tttctgcagg |
| 781 | taatggtggc agcagcctct cttacacaaa cccagcagtg gcagccactt ctgccaactt |
| 841 | gtaggggcac gtcgcccgct gagctgagtg gccagccagt gccattccac tccactcagg |
| 901 | ttcttcaggg ccagagcccc tgcaccctgt ttgggctggt gagctgggag ttcaggtggg |
| 961 | ctgctcacag cctccttcag aggccccacc aatttctcgg aca |
| 29. MCU human DNA, Mitochondrial Calcium Uniporter | |
| (SEQ ID NO: 29) | |
| 1 | ggcggcgttt ccagttgaga gatggcggcc gccgcaggta gatcgctcct gctgctcctc |
| 61 | tcctctcggg gcggcggcgg cgggggcgcc ggcggctgcg gggcgctgac tgccggctgc |
| 121 | ttccctgggc tgggcgtcag ccgccaccgg cagcagcagc accaccggac ggtacaccag |
| 181 | aggatcgctt cctggcagaa tttgggagct gtttattgca gcactgttgt gccctctgat |
| 241 | gatgttacag tggtttatca aaatgggtta cctgtgatat ctgtgaggct accatcccgg |
| 301 | cgtgaacgct gtcagttcac actcaagcct atctctgact ctgttggtgt atttttacga |
| 361 | caactgcaag aagaggatcg gggaattgac agagttgcta tctattcacc agatggtgtt |
| 421 | cgcgttgctg cttcaacagg aatagacctc ctcctccttg atgactttaa gctggtcatt |
| 481 | aatgacttaa cataccacgt acgaccacca aaaagagacc tcttaagtca tgaaaatgca |
| 541 | gcaacgctga atgatgtaaa gacattggtc cagcaactat acaccacact gtgcattgag |
| 601 | cagcaccagt taaacaagga aagggagctt attgaaagac tagaggatct caaagagcag |
| 661 | ctggctcccc tggaaaaggt acgaattgag attagcagaa aagctgagaa gaggaccact |
| 721 | ttggtgctat ggggtggcct tgcctacatg gccacacagt ttggcatttt ggcccggctt |
| 781 | acctggtggg aatattcctg ggacatcatg gagccagtaa catacttcat cacttatgga |
| 841 | agtgccatgg caatgtatgc atattttgta atgacacgcc aggaatatgt ttatccagaa |
| 901 | gccagagaca gacaatactt actatttttc cataaaggag ccaaaaagtc acgttttgac |
| 961 | ctagagaaat acaatcaact caaggatgca attgctcagg cagaaatgga ccttaagaga |
| 1021 | ctgagagacc cattacaagt acatctgcct ctccgacaaa ttggtgaaaa agattgatct |
| 1081 | gcaaaaagcc tctgaatcct ggcagaagga acacctgttt gcctttttaa ttaaagcatt |
| 1141 | gcaggtggaa gctgggagcc atgtgggggg tagagcgttt ttacctttaa ttataaaaca |
| 1201 | aaaacagaaa ggatctgagg gaagaaggga atgttaaaac ctgaggatca ggcattgtgg |
| 1261 | aatataagct caaagggctt agtgaatatt gtcttaacca agtatctcag tttctggatg |
| 1321 | aaaatgatgc agttatatag ttgagagatt cataaagaga aaacaatgct gggggtgttc |
| 1381 | gtttcttgca tcttctttgc agagtcagca aaagagtaac acaccagcac cccactcgac |
| 1441 | tctatttgtt tttaatttaa ctgtccctat ttttgacata ggagtaaata aatatactag |
| 1501 | aaaagcaaat tctcatgata tgctaaaata tcattagcat ttattttaaa ttggacccag |
| 1561 | tctctgcaga gttaccagga atctttcctt ccagcatccc tttactgtcc acctacctgt |
| 1621 | acctcttggt tacactcatt ttttccattt gataattgga accaacttat aactgtttaa |
| 1681 | taattgacac tttagattat ctcttaatac cttcttaaat gtctatatat cccagtgctc |
| 1741 | tggatcagtg tctaaaaatc actggcaaca ctgcatgagg ttgttggttt tgttttgttt |
| 1801 | tattaattag tctttcacag gaggaataat tgccctcctt tatatactta tctattgata |
| 1861 | atcccctctc cctccagaac acaaatcaga gggaaagggg gtgttcagct gtactaccaa |
| 1921 | atcaggaaga tgtaaggttt acaaattggc taagaatcat ggctctgtag ccatttcaac |
| 1981 | cagaataatt ttattgctaa tctgctttgt gtgacagcat tccaggccag ccagatggga |
| 2041 | ctgccttgtc tggaggcttt gttcatctcg aaggacacac acttccacac tgtttgtgag |
| 2101 | ccctcccacc tccacaactt cagttgtaaa tcaagtgtgt ggatctcaaa gggtgcaatt |
| 2161 | tatctttata taggaataca tttctagggc ttccttcaag cccactctct tcaccctatt |
| 2221 | ttttcttatc ttaaattgag agaaagagaa ttaatcttat actttgtcaa aacattttct |
| 2281 | accatatttc cagatgacat ctgcgcttga agagtcaaag gaatctgtgt ctaatatcct |
| 2341 | gtttttaact gctgtagggg caggatggaa aggatgatgg gggctgccac accactgatt |
| 2401 | ggccttttct ttcacgtgat tcatccttcc tcattgtggc aaggagtttc tttctctttt |
| 2461 | tcttcctcct ttgggatcat tgtgtatgaa aagaaaaact ttaaatgaca aacccagact |
| 2521 | ccaggtgcct tgcaaaggtt gaaggccagc caggattgct gctgctgctg ctactcctgc |
| 2581 | caacacccct ttcattggca tgacggaatg aaaggatgca tgtctccact tcctgaccct |
| 2641 | ccgcccactt ccttctccct ccaccacccc cagtcgtcag ctccttccct catttatttt |
| 2701 | tgttaagttg tgtgaattat ttttaaccca tttatcctgt ttgtgcatag ggtttttaag |
| 2761 | aagaaacagc acagtgcaac gagcaaatct ttttggggtg tgtgggaagc aagggaggga |
| 2821 | ggacatggag aaaagttctt taaacaaata gcaaactatt gaacatgtgt aaaatcctgt |
| 2881 | atcatttatg aaatatgtat aaaaagcaat gtaccttctg gaacaataaa tacttattca |
| 2941 | atttttgaaa aaaaaaaaaa aaaaaaaaaa aaaaaaaa |
| 30. AAV2 ITR 5′ ITR | |
| (SEQ ID NO: 30) | |
| CCTGCAGGCAGCTGCGCGCTCGCTCGCTCACTGAGGCCGCCCGGGCGTCGGGCG | |
| ACCTTTGGTCGCCCGGCCTCAGTGAGCGAGCGAGCGCGCAGAGAGGGAGTGGCC | |
| AACTCCATCACTAGGGGTTCCT | |
| 31. AAV2 ITR 3′ ITR | |
| (SEQ ID NO: 31) | |
| CCTGCAGGCAGCTGCGCGCTCGCTCGCTCACTGAGGCCGCCCGGGCAAAGCCCG | |
| GGCGTCGGGCGACCTTTGGTCGCCCGGCCTCAGTGAGCGAGCGAGCGCGCAGAG | |
| AGGGAGTGGCCAACTCCATCACTAGGGGTTCCT | |
| 32. AAV2 vector backbone; bold italicized regions | |
| represent ligation overhangs | |
| (SEQ ID NO: 32) | |
| [symbol] AATCAACCTCTGGATTACAAAATTTGTGAAAGATTGACTGGTATTCTTAA | |
| CTATGTTGCTCCTTTTACGCTATGTGGATACGCTGCTTTAATGCCTTTGTATCAT | |
| GCTATTGCTTCCCGTATGGCTTTCATTTTCTCCTCCTTGTATAAATCCTGGTTAG | |
| TTCTTGCCACGGCGGAACTCATCGCCGCCTGCCTTGCCCGCTGCTGGACAGGGGC | |
| TCGGCTGTTGGGCACTGACAATTCCGTGGTGTTTATTTGTGAAATTTGTGATGCT | |
| ATTGCTTTATTTGTAACCATTCTAGCTTTATTTGTGAAATTTGTGATGCTATTGC | |
| TTTATTTGTAACCATTATAAGCTGCAATAAACAAGTTAACAACAACAATTGCATT | |
| CATTTTATGTTTCAGGTTCAGGGGGAGATGTGGGAGGTTTTTTAAAGCGGGGGAT | |
| CCAAATTCCCGATAAGGATCTTCCTAGAGCATGGCTACGTAGATAAGTAGCATGG | |
| CGGGTTAATCATTAACTACAAGGAACCCCTAGTGATGGAGTTGGCCACTCCCTCT | |
| CTGCGCGCTCGCTCGCTCACTGAGGCCGGGCGACCAAAGGTCGCCCGACGCCCGG | |
| GCTTTGCCCGGGCGGCCTCAGTGAGCGAGCGAGCGCGCAGCCTTAATTAACCTAA | |
| TTCACTGGCCGTCGTTTTACAACGTCGTGACTGGGAAAACCCTGGCGTTACCCAA | |
| CTTAATCGCCTTGCAGCACATCCCCCTTTCGCCAGCTGGCGTAATAGCGAAGAGG | |
| CCCGCACCGATCGCCCTTCCCAACAGTTGCGCAGCCTGAATGGCGAATGGGACGC | |
| GCCCTGTAGCGGCGCATTAAGCGCGGCGGGTGTGGTGGTTACGCGCAGCGTGACC | |
| GCTACACTTGCCAGCGCCCTAGCGCCCGCTCCTTTCGCTTTCTTCCCTTCCTTTC | |
| TCGCCACGTTCGCCGGCTTTCCCCGTCAAGCTCTAAATCGGGGGCTCCCTTTAGG | |
| GTTCCGATTTAGTGCTTTACGGCACCTCGACCCCAAAAAACTTGATTAGGGTGAT | |
| GGTTCACGTAGTGGGCCATCGCCCTGATAGACGGTTTTTCGCCCTTTGACGTTGG | |
| AGTCCACGTTCTTTAATAGTGGACTCTTGTTCCAAACTGGAACAACACTCAACCC | |
| TATCTCGGTCTATTCTTTTGATTTATAAGGGATTTTGCCGATTTCGGCCTATTGG | |
| TTAAAAAATGAGCTGATTTAACAAAAATTTAACGCGAATTTTAACAAAATATTAA | |
| CGTTTATAATTTCAGGTGGCATCTTTCGGGGAAATGTGCGCGGAACCCCTATTTG | |
| TTTATTTTTCTAAATACATTCAAATATGTATCCGCTCATGAGACAATAACCCTGA | |
| TAAATGCTTCAATAATATTGAAAAAGGAAGAGTATGAGTATTCAACATTTCCGTG | |
| TCGCCCTTATTCCCTTTTTTGCGGCATTTTGCCTTCCTGTTTTTGCTCACCCAGA | |
| AACGCTGGTGAAAGTAAAAGATGCTGAAGATCAGTTGGGTGCACGAGTGGGTTAC | |
| ATCGAACTGGATCTCAATAGTGGTAAGATCCTTGAGAGTTTTCGCCCCGAAGAAC | |
| GTTTTCCAATGATGAGCACTTTTAAAGTTCTGCTATGTGGCGCGGTATTATCCCG | |
| TATTGACGCCGGGCAAGAGCAACTCGGTCGCCGCATACACTATTCTCAGAATGAC | |
| TTGGTTGAGTACTCACCAGTCACAGAAAAGCATCTTACGGATGGCATGACAGTAA | |
| GAGAATTATGCAGTGCTGCCATAACCATGAGTGATAACACTGCGGCCAACTTACT | |
| TCTGACAACGATCGGAGGACCGAAGGAGCTAACCGCTTTTTTGCACAACATGGGG | |
| GATCATGTAACTCGCCTTGATCGTTGGGAACCGGAGCTGAATGAAGCCATACCAA | |
| ACGACGAGCGTGACACCACGATGCCTGTAGTAATGGTAACAACGTTGCGCAAACT | |
| ATTAACTGGCGAACTACTTACTCTAGCTTCCCGGCAACAATTAATAGACTGGATG | |
| GAGGCGGATAAAGTTGCAGGACCACTTCTGCGCTCGGCCCTTCCGGCTGGCTGGT | |
| TTATTGCTGATAAATCTGGAGCCGGTGAGCGTGGGTCTCGCGGTATCATTGCAGC | |
| ACTGGGGCCAGATGGTAAGCCCTCCCGTATCGTAGTTATCTACACGACGGGGAGT | |
| CAGGCAACTATGGATGAACGAAATAGACAGATCGCTGAGATAGGTGCCTCACTGA | |
| TTAAGCATTGGTAACTGTCAGACCAAGTTTACTCATATATACTTTAGATTGATTT | |
| AAAACTTCATTTTTAATTTAAAAGGATCTAGGTGAAGATCCTTTTTGATAATCTC | |
| ATGACCAAAATCCCTTAACGTGAGTTTTCGTTCCACTGAGCGTCAGACCCCGTAG | |
| AAAAGATCAAAGGATCTTCTTGAGATCCTTTTTTTCTGCGCGTAATCTGCTGCTT | |
| GCAAACAAAAAAACCACCGCTACCAGCGGTGGTTTGTTTGCCGGATCAAGAGCTA | |
| CCAACTCTTTTTCCGAAGGTAACTGGCTTCAGCAGAGCGCAGATACCAAATACTG | |
| TCCTTCTAGTGTAGCCGTAGTTAGGCCACCACTTCAAGAACTCTGTAGCACCGCC | |
| TACATACCTCGCTCTGCTAATCCTGTTACCAGTGGCTGCTGCCAGTGGCGATAAG | |
| TCGTGTCTTACCGGGTTGGACTCAAGACGATAGTTACCGGATAAGGCGCAGCGGT | |
| CGGGCTGAACGGGGGGTTCGTGCACACAGCCCAGCTTGGAGCGAACGACCTACAC | |
| CGAACTGAGATACCTACAGCGTGAGCTATGAGAAAGCGCCACGCTTCCCGAAGGG | |
| AGAAAGGCGGACAGGTATCCGGTAAGCGGCAGGGTCGGAACAGGAGAGCGCACGA | |
| GGGAGCTTCCAGGGGGAAACGCCTGGTATCTTTATAGTCCTGTCGGGTTTCGCCA | |
| CCTCTGACTTGAGCGTCGATTTTTGTGATGCTCGTCAGGGGGGCGGAGCCTATGG | |
| AAAAACGCCAGCAACGCGGCCTTTTTACGGTTCCTGGCCTTTTGCTGGCCTTTTG | |
| CTCACATGTTCTTTCCTGCGTTATCCCCTGATTCTGTGGATAACCGTATTACCGC | |
| CTTTGAGTGAGCTGATACCGCTCGCCGCAGCCGAACGACCGAGCGCAGCGAGTCA | |
| GTGAGCGAGGAAGCGGAAGAGCGCCCAATACGCAAACCGCCTCTCCCCGCGCGTT | |
| GGCCGATTCATTAATGCAGCTGGCACGACAGGTTTCCCGACTGGAAAGCGGGCAG | |
| TGAGCGCAACGCAATTAATGTGAGTTAGCTCACTCATTAGGCACCCCAGGCTTTA | |
| CACTTTATGCTTCCGGCTCGTATGTTGTGTGGAATTGTGAGCGGATAACAATTTC | |
| ACACAGGAAACAGCTATGACCATGATTACGCCAGATTTAATTAAGGCCTTAATTA | |
| GGCTGCGCGCTCGCTCGCTCACTGAGGCCGCCCGGGCAAAGCCCGGGCGTCGGGC | |
| GACCTTTGGTCGCCCGGCCTCAGTGAGCGAGCGAGCGCGCAGAGAGGGAGTGGCC | |
| AACTCCATCACTAGGGGTTCCTTGTAGTTAATGATTAACCCGCCATGCTACTTAT | |
| CTACGTAGCCATGCTCTAGGAAGATCGGAATTCCTAGGCTCCGGTGCCCGTCAGT | |
| GGGCAGAGCGCACATCGCCCACAGTCCCCGAGAAGTTGGGGGGAGGGGTCGGCAA | |
| TTGAACCGGTGCCTAGAGAAGGTGGCGCGGGGTAAACTGGGAAAGTGATGTCGTG | |
| TACTGGCTCCGCCTTTTTCCCGAGGGTGGGGGAGAACCGTATATAAGTGCAGTAG | |
| TCGCCGTGAACGTTCTTTTTCGCAACGGGTTTGCCGCCAGAACACA [symbol] | |
| 33. Forward Primer used to amplify COL3A1 where bold | |
| italisized region represents the Kozac sequence | |
| (SEQ ID NO: 33) | |
| ATGTTAGCGGCCGC [symbol] ATGATGAGCTTTGTGCAAAAGGGGAGC | |
| 34. Reverse Primer used to amplify COL3A1, where bold | |
| italisized region represents a stop codon | |
| (SEQ ID NO: 34) | |
| CTTACGGCTAGC [symbol] TTATAAAAAGCAAACAGGGCCAACGTCCAC | |
| 35. ACTB human DNA, Actin Beta | |
| (SEQ ID NO: 35) | |
| 1 | gttcgttgca acaaattgat gagcaatgct tttttataat gccaactttg tacaaaaaag |
| 61 | ttggcatgga tgatgatatc gccgcgctcg tcgtcgacaa cggctccggc atgtgcaagg |
| 121 | ccggcttcgc gggcgacgat gccccccggg ccgtcttccc ctccatcgtg gggcgcccca |
| 181 | ggcaccaggg cgtgatggtg ggcatgggtc agaaggattc ctatgtgggc gacgaggccc |
| 241 | agagcaagag aggcatcctc accctgaagt accccatcga gcacggcatc gtcaccaact |
| 301 | gggacgacat ggagaaaatc tggcaccaca ccttctacaa tgagctgcgt gtgcctcccg |
| 361 | aggagcaccc cgtgctgctg accgaggccc ccctgaaccc caaggccaac cgcgagaaga |
| 421 | tgacccagat catgtttgag accttcaaca ccccagccat gtacgttgct atccaggctg |
| 481 | tgctatccct gtacgcctct ggccgtacca ctggcatcgt gatggactcc ggtgacgggg |
| 541 | tcacccacac tgtgcccatc tacgaggggt atgccctccc ccatgccatc ctgcgtctgg |
| 601 | acctggctgg ccgggacctg actgactacc tcatgaagat cctcaccgag cgcggctaca |
| 661 | gcttcaccac cacggccgag cgggaaatcg tgcgtgacat taaggagaag ctgtgctacg |
| 721 | tcgccctgga cttcgagcaa gagatggcca cggctgcttc cagctcctcc ctggagaaga |
| 781 | gctacgagct gcctgacggc caggtcatca ccattggcaa tgagcggttc cgctgccctg |
| 841 | aggcactctt ccagccttcc ttcctgggca tggagtcctg tggcatccac gaaactacct |
| 901 | tcaactccat catgaagtgt gacgtggaca tccgcaaaga cctgtacgcc aacacagtgc |
| 961 | tgtctggcgg caccaccatg taccctggca ttgccgacag gatgcagaag gagatcactg |
| 1021 | ccctggcacc cagcacaatg aagatcaaga tcattgctcc tcctgagcgc aagtactccg |
| 1081 | tgtggatcgg cggctccatc ctggcctcgc tgtccacctt ccagcagatg tggatcagca |
| 1141 | agcaggagta tgacaagtcc ggcccctcca tcgtccaccg caaatgcttc tacccaactt |
| 1201 | tcttgtacaa agttggcatt ataagaaagc attgcttatc aatttgttgc aacgaac |

### Example III

### Identification of Biomarkers for Skin Aging

[0081] Chronic exposure to UV irradiation causes an aged phenotype (photo-aging) that is superimposed with chronological aging of the skin. As a consequence, nearly every aspect of skin biology is affected by aging. The self-renewing capability of the epidermis, which provides vital barrier function, is diminished with age and results in numerous clinical presentations, ranging from benign but potentially excruciating disorders like pruritus and defective wound healing to the more threatening carcinomas and melanomas. Yet our current knowledge of the molecular determinants of declining epidermal function in the elderly population is quite limited. Several genome-wide studies have attempted to analyze the transcriptome and epigenome of the aging skin but failed to identify robust drivers of cellular aging in the skin epidermis (Haustead, D. J., Stevenson, A., Saxena, V., Marriage, F., Firth, M., Silla, R., Martin, L., Adcroft, K. F., Rea, S., Day, P. J., Melton, P., Wood, F. M. & Fear, M. W. Transcriptome analysis of human ageing in male skin shows mid-life period of variability and central role of NF-kappaB. Sci Rep 6, 26846 (2016); Makrantonaki, E., Brink, T. C., Zampeli, V., Elewa, R. M., Mlody, B., Hossini, A. M., Hermes, B., Krause, U., Knolle, J., Abdallah, M., Adjaye, J. & Zouboulis, C. C. Identification of biomarkers of human skin ageing in both genders. Wnt signalling—a label of skin ageing? PLoS One 7, e50393 (2012); Raddatz, G., Hagemann, S., Aran, D., Sohle, J., Kulkarni, P. P., Kaderali, L., Hellman, A., Winnefeld, M. & Lyko, F. Aging is associated with highly defined epigenetic changes in the human epidermis. Epigenetics Chromatin 6, 36 (2013)), and reported that the mammalian epidermis appears to resist the aging process (Racila, D. & Bickenbach, J. R. Are epidermal stem cells unique with respect to aging? Aging (Albany N.Y.) 1, 746-50 (2009)). It is widely accepted that besides transcriptional and epigenetic changes, cellular aging is characterized also by profound metabolic alterations. Nonetheless, recent non-targeted metabolomics analysis of full thickness human skin indicated that only a minimal fraction (less than 10%) of detectable metabolites significantly drifted during aging [Kuehne, A., Hildebrand, J., Soehle, J., Wenck, H., Terstegen, L., Gallinat, S., Knott, A., Winnefeld, M. & Zamboni, N. An integrative metabolomics and transcriptomics study to identify metabolic alterations in aged skin of humans in vivo. BMC Genomics 18, 169 (2017); Randhawa, M., Sangar, V., Tucker-Samaras, S. & Southall, M. Metabolic signature of sun exposed skin suggests catabolic pathway overweighs anabolic pathway. PLoS One 9, e90367 (2014)). To the best of our knowledge, all reports on omics studies of transcriptome, epigenome, and metabolome of aging human skin use bulk analysis performed on whole tissue lysates, which very often fails to detect profound changes in isolated small cellular populations (such as stem cells) which drive homeostatic processes.

[0082] Adult organs are maintained through a balance of proliferation, differentiation, and self-renewal of stem cells that take place during normal tissue homeostasis or tissue repair. The epidermis relies on a population of stem cells and proliferating progenitors to continuously maintain its barrier-protective function. It is composed of different cellular lineages: the interfollicular epidermis and its appendages; and the sebaceous glands and the hair follicles. Human epidermis is regenerated approximately every 4 weeks, a process driven by commitment of progenitor cells located within the basal membrane which develop into more differentiated populations. Initial models of epidermal maintenance proposed that the basal layer is composed of two populations of stem cells: slow cycling stem cells and their transiently amplifying progenitors. However, recent advances in linage tracing and live imaging techniques combined with genetic manipulations have now established a simple model of epidermal homeostasis in which basal keratinocytes are born as equally uncommitted stem cells making random choices to divide or differentiate. This process allows both for continuous renewal of the proliferating basal layer and departure of committed cells away from the basal membrane towards the differentiated upper layers of the epidermis. The ultimate goal of this homeostatic behavior is the generation of a solid cornified envelope as a barrier to the outside insults.

### Mass Spectroscopy (LC-MS/MS)

[0083] primary cultures of human keratinocytes from donors of different ages (ranging from Age 18 to Age 72) WERE isolated and grown in strictly progenitor conditions as described in (Roshan, A., Murai, K., Fowler, J., Simons, B. D., Nikolaidou-Neokosmidou, V. & Jones, P. H. Human keratinocytes have two interconvertible modes of proliferation. Nat Cell Biol 18, 145-56 (2016)), after which half of the population were prompted to commit to differentiation by exogenous calcium. To investigate the metabolic changes occurring during the process of differentiation, we subjected both populations (progenitors and committed cells) from young, medium, and old ages to polar steady-state metabolomics analysis by liquid chromatography-based tandem mass spectrometry (LC-MS/MS), and determined 296 metabolite profiles for each sample. Experiments with progenitor and committed primary cultures were run in triplicates and values for every measured metabolite were compared across all samples. Normalization was performed based on cell number in each individual sample. Alterations in multiple classes of metabolites were observed by hierarchical clustering in the mature keratinocyte population (but not the progenitor population) pointing to age-related functional metabolic deteriorations of progenitors' ability to build a young epidermis.

### Whole Transcriptome RNA Sequencing

[0084] For each sample, total RNA was extracted using RNeasy mini kit (Qiagen) and treated with on-column RNase-free DNase I (Qiagen) following manufacturer's instructions. 1 ug of RNA from each sample was used for library preparation. RNA-seq libraries were constructed using TruSeq Stranded Total RNA Library Prep Kit with Ribo-Zero Gold (Illumina) designed for cytoplasmic and mitochondrial rRNA depletion. All coding RNA and certain forms of non-coding RNA were isolated using bead-based rRNA depletion, followed by cDNA synthesis, and PCR amplification as per manufacturer's protocol. Final libraries were analyzed on Bioanalyzer (Agilent), quantified with qPCR, pooled together, and run on one lane of an Illumina HiSeq 2500 using 2×100-bp paired-end reads. The Illumina paired-end adapter sequences were removed from the raw reads using Cutadapt v1.8.1. The TruSeq adaptor sequence 5′-AGATCGGAAGAGCACACGTCTGAACTCCAGTCAC-3′ was used for read 1, and its reverse complement, 3′-AGATCGGAAGAGCGTCGTGTAGGGAAAGAGTGTAGATCTCGGTGGTCGCCGTATCATT-5′ was used for read 2.

[0085] Next, RNA libraries were processed using a pipeline which includes STAR-HtSeq-GFOLD for alignment, count generation, and gene expression. Briefly, STAR aligner (v. 2.4.0j) was used to map the reads to hg19, and HtSeq was used to generate gene expression counts. Since each donor is considered an N of 1 (i.e. donors are not grouped in replicates), GFOLD and custom R scripts were used to determine gene and differential expression.

### Biological Network Propagation

[0086] To identify functional modules of genes that reflect age-related changes, gene-gene interaction (protein-protein interaction, PPI) network were integrated with expression data by a computational algorithm. This method is called Network Propagation, which propagates the expression values by the topology of the network. In literature, network propagation is typically employed on mutation data to classify cancer informative subtypes by clustering patients with mutations in similar network regions (Vanunu O, Magger O, Ruppin E, Shlomi T, Sharan R (2010) Associating genes and protein complexes with disease via network propagation. PLoS Comput Biol 6: e1000641). In this analysis, a network graph was first created by using the STRING database, such that nodes correspond to genes and edges correspond to interactions between genes. For each gene (node), the value was mapped with the deviation of gene expression in specific sample (age18, age46, age64, or age72) and the mean value of the four samples. Next, the implementation of network propagation processed a random work on a network with the function: Fₜ₊₁=αFₜA+(1−α)F₀, where F₀ is a comparison-by-gene matrix, A is a degree-normalized adjacency matrix derived from the topology of the network, α is a tuning parameter governing the amount of signal that was passed to the neighboring nodes of the network during signal propagation. Based on the function, the propagation occurred by iteration during which a certain ratio of the node value was spread to its neighbors. After several iterations, each gene gets a propagated score. Genes with high propagated scores were regarded as candidates associated with aging functions. In different age samples, a common module with higher propagated values (1,306 genes) was detected by clustering the results from the propagation. FIGS. 7A-7B show an illustration of the network propagation method, FIG. 7A shows three identical networks before network propagation with three different nodes were assigned with values, while FIG. 7B demonstrates the network after propagation. Here higher brightness of a node responds to a higher score.

### O2-PLS Method for Integrative Modeling of Transcript and Metabolite Data

[0087] Next a gene set highly correlated with metabolites across different ages was identified using the O2-PLS regression method which is based on partial least squares and orthogonal signal correction (OSC) filter (Johan Trygg, Svante Wold, O2-PLS, a two-block (X-Y) latent variable regression (LVR) method with integral OSC filter, J. Chemometrics; 17: 53-64 (2003)). Broadly, the algorithm separates structured noise from transcript and metabolite matrices, X and Y respectively, and identifies a joint covariation to use in a predictive model. To identify highly correlated genetic and metabolic markers of aging, we used the model on metabolic data of progenitor and committed to differentiation primary cells, and transcriptomic data on progenitor cells only. As a measure of stem cell function, i.e. capacity to commit to differentiation and form proper epidermis, we calculated a metabolic score matrix based on the difference of metabolite levels in the differentiated cell population relative to that of their progenitors for ages ranging from young to old. We then combined these metabolic scores with the transcript data across different ages to identify trends of common variation. Briefly, the algorithm consists of: 1. Decomposition of the covariance Y T X matrix into orthogonal score matrix C, singular value matrix D, and orthonormal loading matrix W; 2. Calculation of X score matrix T where T=XW, and respective removal of structured noise; 3. Calculation of Y score matrix U where U=YC, and respective removal structured noise; and 4. Predictions of U and T with least squares. We determined significance level of (1−α), with α=0.05/n for the transcript data with n=number of genes, and α=0.05/m for the metabolite data with m=number of metabolites. We then performed randomization by reshuffling the original data sets X and Y, 1000 times, and identified thresholds for lower and upper α/2 quantiles for transcript and metabolite correlation loadings. We determined a list of 176 significant genes which we included in network propagation for further processing as part of the network.

### Distance Network

[0088] Global network-similarity measures were adopted to better capitalize on biological relationships between selected genes and identify master regulators of skin stem and progenitor cells aging. A gene association network was first constructed by mapping STRING network to each gene level. The network is an undirected graph in which nodes represent genes and edges between two nodes denote an association between two corresponding genes. Weights are used on the edges to represent the probability that such an association exists. After constructing the gene network graph, a random walk graph kernel method was used to capture global relationships within the graph. A graph kernel is a kernel function that computes the probability of reaching one node after a random walk starting from another node, and the computed probability is used for global similarity of two nodes (genes). The resulting graph creates a global distance network where the edge between two nodes (genes) represents the global distance in this network instead of a direct interaction. Laplacian Exponential Diffusion Kernel was used as the kernel function, i.e.:

$$K = {lim}_{n \to ∞} {( I + \frac{β L}{n} )}^{n} = {e}^{β L} ,$$

where L is an undirected graph Laplacian matrix, and β is the diffusion parameter that determines the degree of diffusion. e^{βL} is a random walk that starts from a node to its neighboring node with the probability β. Since e^{βL} is positive definite for a Laplacian matrix, it can be used as a kernel matrix. The resulting kernel matrix is a connected network, which detected not only the direct interaction from the original gene association network, but also all indirect interactions via other genes. As a result, the distances among all genes in the network are determined. Next, these distances are used to distinguish highly expressed neighborhoods with a certain distance from a candidate gene, even in cases when the genes may not directly interact. However, the above equation cannot be solved directly because of computation complexity (O(n³)). We therefore further applied a dimension reduction method, called Cholesky decomposition, to trim the Laplacian matrix L by decomposing it into the product of a lower triangular matrix. Cholesky decomposition is to transform a matrix A into a product of a lower triangular matrix P of rank n (P=(pᵢⱼ) with pᵢⱼ=0 if i<j and pᵢⱼ>0, where i=1, 2, . . . , n) and its transpose, P^{T}: A=P·P^{T}. To reduce the dimensionalities of kernel matrices, we applied the Incomplete Cholesky Decomposition (ICD) with pivoting in order to reduce the dimensionalities by approximating a lower rank matrix (m<<n), such that A≈\tilde{P}·\tilde{P}^{T}, where A∈R^{n×m}, m<<n. We then obtained a lower triangular matrix \tilde{P} of rank m. The overall complexity was O(m²n) and the storage requirement was O(mn). Previously, similar approach has been implemented by Nitch et. al in C++ for the study on disease-causing genes in monogenic genetic diseases [Nitsch D, Tranchevent L C, Thienpont B, Thorrez L, Van Esch H, et al. (2009) Network analysis of differential expression for the identification of disease-causing genes. PLoS One 4: e5526.]. In our study, we constructed the network in R environment.

### Scoring the Genes by Integrating the Distance Network and Gene Expression

[0089] The gene expression profiles were mapped to the distance network obtained above. More specifically, the fold changes between the two conditions (two ages) were computed to obtain the differential expression level for the genes in genome. It was considered whether the gene was highly differentially expressed or not, hence, the absolute value of the fold-change was relevant for our method. All differential expression levels, without threshold to distinguish between highly and lowly differentially expressed genes, were used to compute the scores. Since our method computes the scores with all differential expression, there is no threshold used to distinguish between highly and lowly differentially expressed genes. The score of the candidate biomarker gene was calculated by measuring the differential expression levels of its neighborhood. First, the differential expression level of all neighbors in the distance network were ordered by their distance to the candidate gene. The rank of the diffusion distance was then taken as the new distance measure. Second, the new differential expression levels were generated by multiplying the gene expression (fold change value here) with a weighting function (w=e^{-β≠γ}, where γ is the rank, β is the parameter of neighborhood size) to consider the expression of both close and far neighbors. β is the scale parameter to determine how quickly the weight decreased as a function of distance, and it was set to 0.5 to reach sufficiently far away genes in the network for the candidate gene. Lastly, we randomly shuffled original expression values over the network, and then defined the gene score for a candidate gene was by select the maximum deviation between the new differential expression values (weighted) and the randomized expression. Hence, the gene score was related to the level of differential expression level of close neighbors. To estimate the significance of the signal of the actual candidates, we defined the distribution of the scores by randomly distributing the expression data on the network and repeating 3,000 times. By comparing the score of each candidate gene, an empirical p-value for each candidate gene was determined. The score of a candidate gene was considered significant if the score was greater than 95% (α=0.05).

[0090] Although previous analyses of aging human skin revealed only non-significant changes in transcriptome, epigenome and metabolome and failed to define molecular drivers of altered epidermal function in the elderly, our model for selection of aging biomarker genes indicates that the processes associated with skin aging hinder the ability of epidermal progenitors to effectively differentiate to mature keratinocytes during commitment to differentiation, resulting in thinner aged epidermis. In FIG. 8A, a network was proposed built upon the top 10 most significantly enriched (non-disease) KEGG pathways of our analysis with an FDR q-value<0.01, and report the top genes with highest scoring (as generated by integrating the distant network and gene expression of the neighborhood) involved in one or multiple of the enriched top pathways (FIG. 8B). The node sizes in the network represent log 2 fold change of gene expression from young to old, i.e. negative values represent a decrease, while positive values—an increase. The strength of gene-to-gene interactions is visualized by light to dark hue, i.e. from weak to strong, respectively. Finally, top hits scored by weighted gene expression of their distant network are reported as master regulators in the following pathways: 1_Ribosome, 2_Oxidative phosphorylation, 3_Non-alcoholic fatty liver disease (NAFLD), 4_Protein processing in endoplasmic reticulum, 5_Proteasome, 6_Metabolic pathways, 7_Protein export, 8_Carbon metabolism, 9_Citrate cycle (TCA cycle), 10_Glutathione metabolism. The visualization results were summarized from FIG. 8 in TABLE 3.

### Validation of Maleate Dehydrogenese 2 (MDH2)

[0091] One of the hallmarks of skin stem cell aging is found that and deterioration in differentiation capacity is characterized with altered Carbon metabolism and TCA cycle, and aim to validate the functional properties of a herein reported regulator gene—Maleate dehydrogenase 2 (MDH2). MDH2 is a metabolic enzyme which is involved in processes associated with oxidation of malate to oxaloacetate by utilizing NAD/NADH cofactors in the Citrate cycle (TCA cycle), and affects energy consumption and metabolism between the mitochondria and cytosol. In FIGS. 9A-10B, protein production of MDH2 in aging skin progenitors of primary cultures were measured using Western blot, and it was confirmed that MDH2 levels gradually decrease with age, thus deeming it a valid biomarker for skin aging.

TABLE 3
Pathways id's: 1_Ribosome, 2_Oxidative phosphorylation,
3_Non-alcoholic fatty liver disease (NAFLD), 4_Protein processing in
endoplasmic reticulum, 5_Proteasome, 6_Metabolic pathways, 7_Protein export,
8_Carbon metabolism, 9_Citrate cycle (TCA cycle), 10_Glutathione
metabolism, and their associated gene members.

| | | Propagation | | | |
|---|---|---|---|---|---|
| ID | Pathway | score | Degree | Log2(Fold Change) | Label |
| ANPEP | 10 | 0.5518 | 44 | 1.5000 | ANPEP |
| ATF6B | 4 | 1.4319 | 66 | −0.5000 | ATF6B |
| ATP6V0C | 2 | 0.5240 | 174 | −0.7451 | ATP6V0C |
| CERS3 | 6 | 1.5163 | 14 | −0.5000 | CERS3 |
| COX4I1 | 2_3_6 | 1.2876 | 438 | −0.5000 | COX4I1 |
| COX5B | 2_3 | 0.9197 | 402 | −0.5000 | COX5B |
| COX6C | 2 | 0.5518 | 262 | −0.5000 | COX6C |
| DDIT3 | 3_4 | 0.9098 | 150 | −0.9325 | DDIT3 |
| DNAJC3 | 4 | 0.9098 | 78 | −0.9639 | DNAJC3 |
| G6PD | 8_10 | 0.3991 | 210 | −0.5000 | G6PD |
| GALNT5 | 6 | 1.0381 | 6 | −2.0850 | GALNT5 |
| GMDS | 6 | 2.7952 | 46 | 1.0850 | GMDS |
| GPT2 | 8 | 0.5518 | 24 | −0.5000 | GPT2 |
| GPX4 | 10 | 0.3033 | 426 | −1.9811 | GPX4 |
| GSTM1 | 10 | 0.3033 | 74 | −1.5473 | GSTM1 |
| GSTM3 | 10 | 0.3033 | 42 | −0.5000 | GSTM3 |
| GSTM4 | 10 | 0.5758 | 32 | −0.5000 | GSTM4 |
| GSTO1 | 10 | 0.3366 | 358 | −0.1374 | GSTO1 |
| GSTO2 | 10 | 0.3033 | 88 | −0.7035 | GSTO2 |
| HSPA5 | 7 | 0.5240 | 322 | 0.2655 | HSPA5 |
| IDH2 | 9 | 0.3008 | 236 | −0.5000 | IDH2 |
| IDH3B | 9 | 0.3033 | 324 | 1.0850 | IDH3B |
| IDH3G | 8_9 | 0.3991 | 244 | −1.9507 | IDH3G |
| INSR | 3 | 0.9098 | 260 | −1.2244 | INSR |
| MDH1 | 8_9 | 0.5986 | 412 | 0.8219 | MDH1 |
| MDH2 | 8_9 | 0.5692 | 570 | −0.9150 | MDH2 |
| MGST1 | 10 | 0.3033 | 54 | −0.5000 | MGST1 |
| MOGS | 4_6 | 1.2167 | 106 | 1.0850 | MOGS |
| NDUFA12 | 2_3_6 | 1.2876 | 500 | −0.7630 | NDUFA12 |
| NDUFS4 | 2_3 | 0.7288 | 342 | 0.5000 | NDUFS4 |
| NDUFS5 | 2_3 | 0.9197 | 576 | −0.5000 | NDUFS5 |
| NME2 | 6 | 1.0887 | 414 | −0.5000 | NME2 |
| NOS3 | 6 | 1.3995 | 240 | −0.5000 | NOS3 |
| OXA1L | 7 | 0.5240 | 208 | −0.5000 | OXA1L |
| PCK2 | 9 | 0.5518 | 68 | 3.0850 | PCK2 |
| PDIA3 | 4 | 1.0887 | 204 | −1.5995 | PDIA3 |
| PHGDH | 8 | 0.5240 | 142 | −0.5000 | PHGDH |
| POMP | 5 | 0.3746 | 474 | −0.8479 | POMP |
| PPA2 | 2 | 0.6260 | 204 | −1.0850 | PPA2 |
| PRDX6 | 6 | 1.2876 | 134 | −0.5000 | PRDX6 |
| PREB | 4 | 0.9098 | 172 | −0.5000 | PREB |
| PSMA5 | 5 | 0.3991 | 494 | −0.5000 | PSMA5 |
| PSMB4 | 5 | 2.0684 | 794 | −2.5000 | PSMB4 |
| PSMB6 | 5 | 0.3991 | 770 | −2.8219 | PSMB6 |
| PSMC3 | 5 | 2.0684 | 636 | −0.5000 | PSMC3 |
| PSMD14 | 5 | 0.3609 | 606 | −0.5000 | PSMD14 |
| PSMD2 | 5 | 2.0684 | 382 | 0.6890 | PSMD2 |
| PSMD4 | 5 | 0.5240 | 312 | −0.5000 | PSMD4 |
| PSMD8 | 5 | 0.3746 | 692 | −2.5000 | PSMD8 |
| PSMF1 | 5 | 0.9098 | 94 | 0.5000 | PSMF1 |
| RBX1 | 4 | 1.2876 | 386 | −0.5000 | RBX1 |
| RPL11 | 1 | 1.2876 | 548 | −0.5000 | RPL11 |
| RPL24 | 1 | 2.0684 | 530 | −0.5000 | RPL24 |
| RPL3 | 1 | 2.0684 | 376 | −1.4888 | RPL3 |
| RPL31 | 1 | 2.0684 | 362 | −1.0850 | RPL31 |
| RPL37 | 1 | 2.0684 | 318 | −0.5000 | RPL37 |
| RPL39 | 1 | 2.7952 | 318 | −0.7224 | RPL39 |
| RPL7 | 1 | 2.0684 | 366 | −1.5000 | RPL7 |
| RPS11 | 1 | 2.0684 | 328 | −1.0146 | RPS11 |
| RPS24 | 1 | 1.2876 | 392 | 0.5000 | RPS24 |
| RPS4X | 1 | 2.0684 | 280 | −3.0850 | RPS4X |
| RRM1 | 10 | 0.3033 | 308 | −1.0369 | RRM1 |
| SDHB | 9 | 0.3033 | 392 | 0.9854 | SDHB |
| SDHC | 9 | 0.3366 | 228 | −0.5000 | SDHC |
| SDHD | 2_3_8_9 | 0.9098 | 214 | −0.5000 | SDHD |
| SDSL | 8 | 0.5955 | 30 | −1.0850 | SDSL |
| SEC11C | 7 | 0.3033 | 238 | −0.5000 | SEC11C |
| SEC61A1 | 7 | 0.3033 | 392 | −0.5000 | SEC61A1 |
| SEC61B | 7 | 0.3746 | 328 | −0.5000 | SEC61B |
| SEC61G | 7 | 0.3991 | 530 | −0.5000 | SEC61G |
| SEL1L | 4 | 0.9098 | 102 | −0.6354 | SEL1L |
| SHMT2 | 8 | 0.5240 | 346 | −0.5000 | SHMT2 |
| SPCS1 | 7 | 0.3033 | 552 | −0.3074 | SPCS1 |
| SPCS2 | 7 | 0.3024 | 284 | −0.8536 | SPCS2 |
| SPR | 6 | 1.8711 | 16 | 0.1781 | SPR |
| SRP14 | 7 | 0.3033 | 424 | −0.5000 | SRP14 |
| SRP19 | 7 | 0.3033 | 402 | −0.4198 | SRP19 |
| SUCLG1 | 9 | 0.3173 | 312 | −0.5000 | SUCLG1 |
| TALDO1 | 8 | 0.5240 | 346 | 0.3301 | TALDO1 |
| TNF | 3 | 0.9098 | 1368 | −1.0850 | TNF |
| UQCRH | 2 | 0.5943 | 576 | 1.0850 | UQCRH |
| WFS1 | 4 | 0.9098 | 48 | −5.0850 | WFS1 |
| XBP1 | 3_4 | 1.0381 | 140 | −0.5000 | XBP1 |

[0092] According to certain embodiments, genes relating to skin aging as disclosed herein represent skin aging biomarkers and their expression can be modulated by the methods disclosed herein to promote skin function and health. According to certain embodiments, the disclosed method comprises delivery of genes comprising sequences of SEQ ID NOS 1-122 to the skin or delivery of genes that modulate the expression of the genes comprising sequences of SEQ ID NOS 1-122.

Lengthy table referenced here
US20200375868A1-20201203-T00001
Please refer to the end of the specification for access instructions.

### Example IV

### Optimization of Gene Transfer to Whole Skin

[0093] To create an optimal framework for delivery of transgenes to skin cells, fluorescent enhanced GFP reporter transgene was cloned in an AAV vector containing AAV2-derived inverted terminal repeat 1 (ITR1) in the flip direction and an inverted terminal repeat 2 (ITR2) in the flop direction. The ITR1 element is annealed to human hEF1a (human elongation factor-1 alpha) promoter, while ITR2 element is annealed to 134b-long SV40 late polyadenylation (truncated SV40 late poly(A)) element and 248b-long WPRE3 (truncated) element. FIG. 10A shows a schematic of a length-optimized modular vector with EGFP gene inserted. The gene is flanked by unique SpeI and NotI restriction sites. The gene is preceded by a Kozak sequence (GCCACC) and is terminated by a (TAA) stop codon, prior to the NotI restriction site.

[0094] To evaluate the efficacy of gene transfer to human skin cells, a variety of AAV capsids were used to make hybrid AAV viral serotypes. A typical workflow is shown on FIG. 10B. These vectors were delivered topically to human skin explants pre-treated with low frequency (20 kHz) ultrasound. Sonic wave with a period 30 sec and duration of 3 cycles was generated to permeabilize abdominal human skin by disrupting its cornified layer—the stratum corneum. Recombinant AAV viruses of serotypes 2/1, 2/2, 2/5, 2/6.2, 2/7, 2/8, 2/9, and 2/10 were administered at a dose of 2E+11 GC per 1.2 cm-dia full-thickness human skin. After AAV-treatment, human skin explants were cultured in 1 cm-transwells for 8 days after which tissues were analyzed for gene expression. As shown on FIG. 10C, the capsids of AAV2/5, AAV2/2, AAV2/6.2, and AAV2/8 gave the most robust gene expression characterized by gene expression of the transgene in whole skin lysate. Reported gene expression values were normalized to endogenous Active-beta (ACTB) levels relative to a control untreated tissue. Next, in FIG. 10D, the absolute gene expression copy number was evaluated based on a standard curve built upon known amounts of input transgene. Similarly, AAV2/5, AAV2/6.2, AAV2/2, and AAV2/8 presented with the highest expression values. FIGS. 10C and 10D show mean and standard error to the mean of N=2 replicates.

[0095] To determine the expression potential of a panel of viral promoters in human skin tissue, a group of ubiquitous and tissue-specific promoters was tested in human skin explants as represented in the workflow of FIG. 10B. The tested panel included cytomegalovirus immediate early promoter (CMV), CASI promoter (a fusion of cytomegalovirus immediate early promoter (CMV) followed by a fragment of chicken-f-actin (CAG) promoter), short human elongation factor-1 alpha (shEF1a), and human elongation factor-1 alpha (hEF1a). Recombinant AAV2 serotype at a dose of 2E+11 GC per 1.2 cm-dia full-thickness human skin was administered to all tissue explants. The strength of human skin cell expression of each promoter was evaluated by the gene expression of reporter gene, EGFP both in terms of relative (to negative control) expression (FIG. 10E) and absolute copy number expression (FIG. 10F). FIGS. 10E and 10F show mean and standard error to the mean of N=2 replicates. Within the duration of the experiment at day 8, CMV and CASI presented with the highest expression potential while shEF1a presented with levels on the same order.

[0096] To confirm dose-dependency within the range of use, AAV2/8-hEF1a-EGFP was administered to human skin explants at the doses of 5E+10, 1E+11, 2E+11, and 5E+11 GC. The strength of cell expression was evaluated by the gene expression of reporter gene, EGFP both in terms of relative (to negative control) expression (FIG. 10G) and absolute copy number expression (FIG. 10H). A typical dose of 2E+11 yielded a total of 642 EGFP transcripts.

### Example V

### Optimization of Gene Transfer to Human Skin Dennis

[0097] To establish delivery efficiency selectively to dermal skin cells, the native fluorescence of a reporter gene, EGFP was measured over a large surface area in full thickness human breast skin tissues (16 mm×2 mm in cross-sectional area) maintained in culture conditions post-treatment. Human skin explants were harvested 24 hours after the treatment, and embedded in OCT. To determine the total signal over the cross-sectional area of the dermis (16 mm×1 mm×20 μm), native GFP fluorescence was quantified using a custom image post-processing pipeline in MatLab. The algorithm executes flat-field and background corrections, creates a logical mask of the image, and performs linear un-mixing of the total fluorescence intensity based upon different emission spectra of tissue auto-fluorescence and signal due to the expression of EGFP. The process is shown in FIG. 11A for one untreated, one ultrasound-treated, and one AAV-treated tissue sample. A schematic illustration of AAV-CMV-EGFP vector is shown in FIG. 11B Recombinant AAV viruses of serotypes 2/1, 2/2, 2/5, 2/6.2, 2/8, 2/9 were administered at a dose of 2E+11 GC per tissue explant and the fluorescence signal is reported for two donors, one young (of ages 30) and one old (of age 52) in FIG. 11C. While expression levels differed between the two human donors, the optimal gene expression in dermal cells was consistent and the highest for AAV2/8, AAV2/2, AAV2/9, and AAV2/1. The highest amount of protein expression reached 4-fold over that of an untreated-tissue, and covered nearly 50% of the cross-sectional dermal area in the young donor, as shown on the heatmap of FIG. 11D. Large variation was observed between the two donors.

[0098] The infectivity of the CMV promoter in human dermal cells shows a transient response over time and is the highest during the first week of infection. To quantify longer term expression response in the human dermis, skin explants (from human donor id=4 of medium age) were AAV2-infected with CMV, CASI, and hEF1a promoters and harvested at Day 12. To separate epidermis from dermis, explants were treated with a protease (dispase II at 5U/ml, overnight) to facilitate peeling off the epidermis. A population of dermal cells (predominantly skin fibroblasts) was then dissociated using Collagenase I at 1 mg/ml in DMEM/Serum (20%) solution at 37 C. The isolated cells were stained with anti-EGFP and anti-Cytokeratin 15 antibodies for processing with FACS. A population of ˜30,000 cells was analyzed. As shown on FIG. 11E, the populations of single EGFP-positive cells and double EGFP/K15-positive cells were summed and the highest infectivity capacity yielded a total of 13.7% for the hEF1a-driven AAV vector.

### Example VI

### Optimization of Gene Transfer to Human Skin Epidermis

[0099] The expression potential of recombinant AAV virus to infect and deliver genes to human epidermis was quantified by flow cytometry. Whole skin was permeabilized using topical ultrasonic treatment, after which it was spot-treated with therapy. In one instance, skin explants (from human donor id=4 of medium age) were AAV-treated with hybrid serotypes of AAV2/2, AAV2/5, AAV2/6.2, AAV2/8, AAV2/9, and AAV2/10 at a dose of 2E+11 GC per explant, and cultured for 12 days. All vectors were driven by the hEF1a promoter. The epidermis of the explants was separated from the dermis using an overnight protease treatment (dispase II at 5U/ml), and keratinocyte cells were dissociated with Trypsin-EDTA (0.25%) for 15 min at 37 C. The dissociated cells were stained with an anti-EGFP antibody and quantified for expression of GFP. As shown in FIG. 12A, AAV2/5 provided the highest GFP signal and the most robust expression of 22.4% in total epidermal keratinocyte cells. In another instance, the efficacy potential of CMV, CASI, shEF1a, and hEF1a promoters was evaluated using AAV2/2 at a dose of 2E+11 GC per explant. hEF1a, CMV, shEF1a (truncated version) presented comparable efficiencies (FIG. 12B). Dose dependency response was evaluated using AA8-hEF1a from 5E+10 to 5E+11 GC per explant. As seen on FIG. 12C, dose response did not yield a linear response in the epidermis.

### Example VII

### Optimization of Gene Transfer to Human Skin Stem and Progenitor Cells

[0100] Skin is maintained through a balance of proliferation, differentiation, and self-renewal of stem cells that take place during normal tissue homeostasis or tissue repair. The epidermis relies on a population of stem cells and proliferating progenitors to continuously maintain its barrier-protective function. While the epidermal differentiated population (mature keratinocytes) has a lifespan of ˜4 weeks, the stem and progenitor cell populations have a nearly life-long span.

[0101] To achieve long-term expression of genes in skin tissues, gene transfer to the populations of stem cells located within the basal membrane (slow cycling stem cells and their transiently amplifying progenitors) was optimized. As shown in FIG. 14A, the differentiated keratinocyte population was further analyzed for therapy efficacy towards progenitor stem cells expressing markers either for Cytokeratin 15, a6-Integrin, or both. Based on their ability to infect progenitor and stems cells, the top 5 most efficacious AAV-serotypes measured by GFP and K15 signal are listed in FIG. 13B. In the K15+progenitor and stem cell populations, AAV2/2 and AAV2/5 presented with 50.6% and 42.5% infectivity efficiency, respectively.

[0102] Across all examined viral vectors, the ones with the highest infectivity capacity in the epidermal progenitor and stem cell populations expressing K15 and a6-integrin were AAV2/2-hEF1a, AAV2/2-CASI, AAV2/2-CMV, AAV2/5-hEF1a, and AAV2/8-hEF1a. As shown in FIG. 13C, the best performing vector AAV2/2-hEF1a which stained for 50.6% K15, stained for 23.2% of K15 and a6-integrin, while AAV2/5-hEF1a (42.5% K15) showed 11.5% signal for K15 and a6-integrin. Both AAV2/2 and AAV2/5 serotypes, driven by hEF1a promoter presented with high infectivity towards epidermal stem and progenitor cells, but AAV2/5 presented with higher infectivity towards differentiated keratinocytes. The correspondence between % GFP-positive epidermal cells and % GFP-positive stem and progenitor cells was mapped in FIG. 13D, and no correlation was determined between total capacity of infection, and stem cell capacity of infectivity.

### Example VIII

### Ex Vivo Human Expression of Collagen Transgenes

[0103] Recombinant AAV2/2 virus that expresses human collagen III (alpha domain) driven by a truncated hEF1a promoter was administered to human skin explants at a dose of 2E+11 GC per sample. Ultrasound-mediated gene delivery was executed in a single step, and the process of skin permeabilization required ultrasonic initiation of vibrating cavitational bubbles, active oscillation, instability and bursting of bubbles followed by topical, passive-diffusion delivery of a single therapy dose (FIG. 14A). Type III collagen is a human gene encoding collagen III fibrils, which serve as a major component of the skin extracellular matrix and is primarily produced by dermal fibroblast cells. Within 8 days of administration, Collagen III levels started to increase over the native amounts present in the skin explants, and reached significant amounts (p<0.05) of as high as 3.5-fold overproduction compared to the negative, untreated control (FIG. 14B). FIG. 14B shows the mean and standard error for N=2 human explants. Protein levels for Collagen III were analyzed by Western blot (FIG. 14C).

[0104] To determine the robustness of dermal matrix remodeling and age-associated thinning of the dermis by modulation of collagen III, three human explant from another donor were treated with the same rAAV virus encoding collagen III protein. rAAV2/2 virus was administered to human skin which was cultured for 8 days and analyzed for levels of collagen III using Western blot. The highest amount of collagen III expression reached 3.2-fold overproduction compared to the native levels in the control tissue. FIG. 14D shows significant levels of overexpression (p<0.005) and presents the mean and standard error for N=3 human explants. Western blot images are shown in FIG. 14E.

[0105] This example shows that the recombinant AAV virus expressing collagen III can be effectively used to provide consistent protein overexpression with the human dermis.

### Example IX

### In Vivo Skin Rejuvenation by Modulation of 4 Age-Related Genes

[0106] This example describes modulation of 4 age-related genes—(mouse) KRT6A, (human) TET3, (mouse) TGFb1, and (human) COL3A1 in SKH-1E hairless mice. KRT6 Å and TET3 target the epidermis and improve functions related to stem and progenitor cell renewal and DNA de-methylation, while TGFb1 and COL3A1 target the dermis and modulate production of extracellular proteins (as shown in FIG. 15A). Recombinant AAV virus was produced—recombinant AAV of serotype 2 was used to express COL3A1, TET3, and KRT6A, while recombinant AAV of serotype 8 was used to express TGFb1. The rAAV vector consisted of swappable transgene flanked by unique NheI and NotI restriction sites. The rAAV vector is driven by a length-optimized promoter shEF1a (truncated hEF1a), WPRE3 and SV40 pA of sizes 231b, 248b, and 134b, respectively. These length optimizations permitted packaging and expression of larger transgene as in the case of COL3A1. All vectors were administered at one location via a single US-permeabilization treatment at a dose of 2E+11 GC per animal. At Day 4, skin tissues were harvested and whole tissue lysates were analyzed by RT-qPCR to measure expression levels of the transferred transgenes. As shown on FIG. 15B, all modulated transgenes increase in expression ranging from 3.4-fold to 6.5-fold relative to a negative (untreated) control tissue.

### Example X

### In Vivo Skin Rebuilding of Skin's Extracellular Matrix by Long-Term Expression of Collagen III

[0107] To determine expression capabilities of rAAV in hairless mice as a function of time, rAAV vector expressing collagen III was administered at a dose of 2E+11 GC per animal. FIG. 16A shows a protein expression curve as a function of time from 1 week to 32 weeks. Protein expression started to rise reaching 4-fold overexpression one week after administration and up to 3 weeks, after which it decreases one-fold to 2.25-fold. FIG. 16A represents a time curve of collagen III production which was maintained for at least 32 weeks after which the experiment was stopped. Expression protein levels were determined by Western blot on mouse skin lysates for N=8 mice (FIG. 16B). In parallel, collagen III levels were analyzed in human skin and levels were compared relative to the last data point in the mouse in vivo experiment (FIG. 16C). The native amounts of collagen III in human skin were lower than the newly produced amount in mouse skin after 32 weeks-1.7-vs 2.25-fold, respectively.

[0108] This example shows that the recombinant AAV virus disclosed here can be used to drive effective and robust expression of proteins over long periods of time.

### Example XI

### Ultraclean Production and Purification of Recombinant AAV

[0109] HEK293T Cells (ATCC) were expanded in DMEM (Corning) with 10% FBS (Genessee) and 1% Pen/Strep (Life) and cultured on 5-Layer Flasks (Corning) until 70-80% confluent. On Day 0, helper plasmid, capsid plasmid, and transgene ITR plasmid were combined with PEI Max (Polysciences) in a triple plasmid transfection. On Day 3, additional complete media was added to the culture (50% of original volume). On Day 6, NaCl was added to each flask to a final concentration of 0.5M and incubated for 2 hours. Lysed and dissociated cells were then collected and stored overnight at 4 C. On Day 7, the supernatant of the cell lysate was collected and 0.22 μM sterile filtered before addition of PEG 8000 (Calbiochem) to a final concentration of 8% and left at 4 C overnight on a stirplate. On Day 8, PEG mixture was centrifuged at 4000G for 20 minutes. Supernatant was discarded, and pellet resuspended with PBS to a final volume of 8 mL. Benzonase (Millipore) was added and incubated at 37 C for 45 minutes. An ultracentrifuge gradient in optiseal tubes (Beckman-Coulter) was then created by layering resuspended PEG pellet, then 15%, 25%, 40%, and 60% iodixanol (Sigma) from the bottom-up. Samples were then balanced before ultracentrifugation at 240,000G for 1 hour. Tubes were then punctured on the bottom before collecting 500 μL fractions, stopping at the 40-25% interface. Samples were run on a protein gel and fractions with high VP protein purity (FIG. 17A), after which pooled and concentrated using Amicon 100 kDa spin filters (Millipore). PBS with 5% sorbitol and 0.001% Pluronic F68 (Gibco) was added to each tube before an additional spin to wash virus. Concentrated and washed virus was then titered via probe-based qPCR against the WPRE3 region on the capsid. The quality of the virus was visually inspected using transmission electron microscopy, and it was determined that more than 95% of the viral capsids were fully packaged, as shown on FIG. 17B for AAV2/2 expressing EGFP.

### Example XII

[0110] Ex Vivo Human Immune Response to rAAV

[0111] This example illustrates the therapeutic use of genetically engineered skin patch for in vivo immunomodulation, immunoprophylaxis, and passive delivery of therapies for diseases such as cancers, autoimmune diseases, metabolic disorders and viral infections. The virtual therapeutic skin patch is primed with transgenes serving preventative or therapeutic use by non-invasive delivery of recombinant AAV virus whose penetration to the epidermal and dermal layers is enabled by topical cavitational, low-frequency ultrasound method. Ultrasonic disruption of the stratum corneum is reversible and facilitates rAAV transport into the epidermis, the papillary and reticulous dermis avoiding injury and inflammation of the treated and surrounding tissues. FIGS. 18A-18B show an inflammatory panel at Day 3 and Day 8, respectively, run on epidermal cells dissociated from human skin explants after treatment with rAAV-GFP therapy via ultrasound. At Day 3 (FIG. 18A), no inflammatory response above the baseline levels was detected, while at Day 8 (FIG. 18B) a minor transient response was observed as evidenced by slightly increased gene expression levels of Interferon alpha-1 (INFa1) and Interferon beta-1 (INFb1). However, no acute innate response to the virus was detected as visible from the stable levels of Interferon regulatory factor 3 (IRF3), Serine/threonine-protein kinase (TBK1), and Stimulator of interferon genes protein (STINK). Moderately elevated levels of Tumor protein P63 (p63) is indicative of normal cell proliferation activity in the keratinocyte population.

[0112] The contents of all references, patents and published patent applications cited throughout this application are hereby incorporated by reference in their entirety for all purposes.

### OTHER EMBODIMENTS

[0113] Other embodiments will be evident to those of skill in the art. It should be understood that the foregoing description is provided for clarity only and is merely exemplary. The spirit and scope of the present invention are not limited to the above examples, but are encompassed by the following claims. All publications and patent applications cited above are incorporated by reference in their entirety for all purposes to the same extent as if each individual publication or patent application were specifically and individually indicated to be so incorporated by reference.

LENGTHY TABLES
The patent application contains a lengthy table section. A copy of the table is available in electronic form from the USPTO web site (https://seqdata.uspto.gov/?pageRequest=docDetail&DocID=US20200375868A1). An electronic copy of the table will also be available from the USPTO upon request and payment of the fee set forth in 37 CFR 1.19(b)(3).

The application's sequence listing, which the Patent Office published only in electronic form, follows.

SEQUENCE LISTING (118 sequences)

SEQ ID NO: 1 - DNA, 4321 bp, Artificial Sequence
  Description of Artificial Sequence: Synthetic polynucleotide
cccacgcgtccggactagttctagatcgcgagcggcccggagttggggcgccttgccccgggccccccagcatgaagaccccggcggacacagggtttgccttcccagattgggcctacaaaccggagtcatcccctggctccaggcagatccagctgtggcactttatcctggagctgcttcggaaagaggagtaccagggcgtcatcgcttggcagggggactacggggagtttgtcatcaaggaccctggtgaacctggcgagcctggcggttcaggtccaatgggtccccgaggtccccctggccctcctggcaagaatggagatgatggggaagctggcaagcccggccgtcctggtgagcgtggacctcctggacctcagggtgctcgtggattgcctggaacagctggcctccctggaatgaagggacaccgaggcttcagtggtttggatggtgccaaaggagatgctggtcctgctggtcctaagggagagcccggcagtcctggtgaaaacggagctcctggccagatgggtccccgaggtctgcccggtgagagaggtcgccctggacctcctggcactgctggtgctcgcggtaacgatggtgctgttggtgctgctggaccccctggtcccaccggccccactggccctcctggcttccctggtgcagttggtgctaagggtgaagctggtccccaaggagctagaggctctgaaggtccccagggtgtgcgtggtgagcccggaccccctggccctgctggtgctgccggccctgctggaaaccctggtgctgatggacaacctggcgctaaaggtgccaatggtgctcctggtattgctggtgctcctggcttccctggtgcccgaggcccctctggaccccagggccccagcggccctccaggtcccaagggtaacagtggtgaacctggtgctcctggcaacaaaggagacactggtgccaaaggagaacccggtgctactggagttcaaggtcccccaggccctgccggagaagaaggaaaacgaggagcccgtggtgagcctggaccttccggactgcctggacctcctggcgagcgtggtggacctggtagccgtggtttccctggtgctgatggtgttgctggccccaagggtccttccggtgaacgtggtgctcccggacctgctggtcccaaaggttctcctggtgaagctggtcgccccggtgaagctggtctccctggtgccaagggtctcactggcagtcctggcagccctggtcctgatggcaaaaccggcccccctggtcccgctggtcaagatggtcgccctggacccgcaggtcctcctggagcccgtggccaggctggtgtgatgggattccctggacctaagggtaccgctggagaacctggaaaggctggagagcgaggccttcccggaccccctggcgctgttggtcctgctggcaaagatggagaagctggagctcagggagcccctggccctgctggtcctgctggtgagagaggtgaacaaggtcccgctggctcccctggattccagggtcttcctggtcctgccggtcctcctggtgaagcaggcaagcctggtgaacagggtgttcctggagaccttggtgcccctggaccctctggcgcaagaggcgagagaggtttccctggtgaacgtggtgtacaaggtcccccaggtcctgctggtccccgaggaaacaatggtgcccccggcaacgatggtgccaagggtgatactggtgcccccggagctcccggtagccagggtgcccccggtcttcagggaatgcctggtgaacgtggtgcagctggtcttccaggtcctaagggtgacagaggtgatgctggtcccaaaggtgctgatggttctcctggtaaagatggtgcccgtggtctgactggtcccattggtcctcctggccctgctggtgcccctggtgacaagggtgaagctggtcccagtggtcctcccggtcccaccggagcccgtggtgctcccggagaccgtggtgaggctggtccccctggtcctgctggctttgccggcccccctggtgctgatggccaacctggtgcgaaaggtgaacctggtgatactggtgttaaaggtgatgctggtcctcctggccctgctggtcctgctggaccccccggccccattggtaacgttggtgctcctggacccaaaggtcctcgtggtgctgctggtccccctggtgctactggcttccctggtgctgctggccgtgtcggtccccctggtccctctggaaatgctggaccccctggccctcccggtcccgttggcaaagaagggggcaaaggtccccgtggtgagactggccctgctggacgtcctggtgaagttggtcccccaggtccccccggtcctgctggtgagaaaggatctcctggtgctgatggacctgctggctctcctggtacccctggacctcagggtattgctggacaacgtggtgtggtcggtcttcccggtcagagaggagaaagaggcttccctggtcttcctggcccctctggtgaacctggcaaacaaggtccttctggatcaagtggtgaacgcggtccccctggccccatggggccccctggattggctggtccccctggtgaatctggacgtgagggatcccctggtgctgaaggctcccctggaagggatggtgctcccggggccaagggtgaccgtggtgagactggccctgctggcccccctggtgcccctggtgctcccggtgctcccggccctgttggtcccgctggcaagaatggcgatcgtggtgagactggtcctgctggtcctgctggtcccattggccctgctggtgcccgtggccctgctggaccccaaggcccccgtggtgacaagggtgagacaggcgaacaaggtgacagaggcataaagggtcatcgtggcttctctggtctccagggtcctcctggttctcctggttctcctggtgaacaaggcccctctggagcttcaggtcctgcaggcccccggggtccccctggctctgctggttctcctggcaaagacggactcaacggtctccctggccccattggtccccctggtcctcgaggtcgcactggtgacagcggccctgctggtccccccggccctcctggaccccctggccctcctggacctcccagtggcggttatgacttcagcttcctgcctcagccacctcaagagaagtctcaagatggtggccgctactaccgggccgatgatgctaacgtggttcgtgaccgtgaccttgaggtggacaccaccctcaagagcctgagtcagcagattgagaacatccgcagccccgaaggcagccgcaagaaccctgcccgcacatgccgcgacctcaagatgtgccactctgactggaagagcggagagtactggatcgaccctaaccaaggctgcaacctggacgccatcaaggtctactgcaacatggagacaggtcagacctgtgtgttccctactcagccgtctgtgcctcagaagaactggtacatcagcccgaaccccaaggaaaagaagcacgtctggtttggagagagcatgaccgatggattcccgttcgagtacggaagcgagggctccgaccccgccgatgtcgctatccagctgaccttcctgcgcctaatgtccaccgaggcctcccagaacatcacctatcactgcaagaacagcgtagcctacatggaccagcagactggcaacctcaagaaggccctgctcctccagggatccaacgagatcgagctcagaggcgaaggcaacagtcgcttcacctacagcacccttgtggacggctgcacgagtcacaccggaacttggggcaagacagtcatcgaatacaaaaccaccaagacctcccgcctgcccatcatcgatgtggctcccttggacattggtgccccagaccaggaattcggactagacattggccctgcctgcttcgtgtaaactccctccaccccaatctggttccctcccacccagcccacttttccccaaccctggaaacagacgaacaacccaaactcaatttcccccaaaagccaaaaatatgggagataatttcacatggactttggaaaacattttttttcctttgcattcacctttcaaacttagtttttacctttgaccaactgaacgtgaccaaaaaccaaaagtgcattcaaccttaccaaaaaagaaaaaaaaaaaagaataaataaataactttttaaaaaaggaaaaaaaaaaaaaaa

SEQ ID NO: 2 - DNA, 3902 bp, Homo sapiens
ccacgcgtccggacgggcccggtgctgaagggcagggaacaacttgatggtgctactttgaactgcttttcttttctcctttttgcacaaagagtctcatgtctgatatttagacatgatgagctttgtgcaaaaggggagctggctacttctcgctctgcttcatcccactattattttggcacaacaggaagctgttgaaggaggatgttcccatcttggtcagtcctatgcggatagagatgtctggaagccagaaccatgccaaatatgtgtctgtgactcaggatccgttctctgcgatgacataatatgtgacgatcaagaattagactgccccaacccagaaattccatttggagaatgttgtgcagtttgcccacagcctccaactgctcctactcgccctcctaatggtcaaggacctcaaggccccaagggagatccaggccctcctggtattcctgggagaaatggtgaccctggtattccaggacaaccagggtcccctggttctcctggcccccctggaatctgtgaatcatgccctactggtcctcagaactattctccccagtatgattcatatgatgtcaagtctggagtagcagtaggaggactcgcaggctatcctggaccagctggccccccaggccctcccggtccccctggtacatctggtcatcctggttcccctggatctccaggataccaaggaccccctggtgaacctgggcaagctggtccttcaggccctccaggacctcctggtgctataggtccatctggtcctgctggaaaagatggagaatcaggtagacccggacgacctggagagcgaggattgcctggacctccaggtatcaaaggtccagctgggatacctggattccctggtatgaaaggacacagaggcttcgatggacgaaatggagaaaagggtgaaacaggtgctcctggattaaagggtgaaaatggtcttccaggcgaaaatggagctcctggacccatgggtccaagaggggctcctggtgagcgaggacggccaggacttcctggggctgcaggtgctcggggtaatgacggtgctcgaggcagtgatggtcaaccaggccctcctggtcctcctggaactgccggattccctggatcccctggtgctaagggtgaagttggacctgcagggtctcctggttcaaatggtgcccctggacaaagaggagaacctggacctcagggacacgctggtgctcaaggtcctcctggccctcctgggattaatggtagtcctggtggtaaaggcgaaatgggtcccgctggcattcctggagctcctggactgatgggagcccggggtcctccaggaccagccggtgctaatggtgctcctggactgcgaggtggtgcaggtgagcctggtaagaatggtgccaaaggagagcccggaccacgtggtgaacgcggtgaggctggtattccaggtgttccaggagctaaaggcgaagatggcaaggatggatcacctggagaacctggtgcaaatgggcttccaggagctgcaggagaaaggggtgcccctgggttccgaggacctgctggaccaaatggcatcccaggagaaaagggtcctgctggagagcgtggtgctccaggccctgcagggcccagaggagctgctggagaacctggcagagatggcgtccctggaggtccaggaatgaggggcatgcccggaagtccaggaggaccaggaagtgatgggaaaccagggcctcccggaagtcaaggagaaagtggtcgaccaggtcctcctgggccatctggtccccgaggtcagcctggtgtcatgggcttccccggtcctaaaggaaatgatggtgctcctggtaagaatggagaacgaggtggccctggaggacctggccctcagggtcctcctggaaagaatggtgaaactggacctcagggacccccagggcctactgggcctggtggtgacaaaggagacacaggaccccctggtccacaaggattacaaggcttgcctggtacaggtggtcctccaggagaaaatggaaaacctggggaaccaggtccaaagggtgatgccggtgcacctggagctccaggaggcaagggtgatgctggtgcccctggtgaacgtggacctcctggattggcaggggccccaggacttagaggtggagctggtccccctggtcccgaaggaggaaagggtgctgctggtcctcctgggccacctggtgctgctggtactcctggtctgcaaggaatgcctggagaaagaggaggtcttggaagtcctggtccaaagggtgacaagggtgaaccaggcggtccaggtgctgatggtgtcccagggaaagatggcccaaggggtcctactggtcctattggtcctcctggcccagctggccagcctggagataagggtgaaggtggtgcccccggacttccaggtatagctggacctcgtggtagccctggtgagagaggtgaaactggccctccaggacctgctggtttccctggtgctcctggacagaatggtgaacctggtggtaaaggagaaagaggggctccgggtgagaaaggtgaaggaggccctcctggagttgcaggacctcctggcaaagatggaaccagtggacatccaggtcccattggaccaccagggcctcgaggtaacagaggtgaaagaggatctgagggctccccaggccacccagggcaaccaggccctcctggacctcctggtgcccctggtccttgctgtggtggtgttggagccgctgccattgctgggattggaggtgaaaaagctggcggttttgccccgtattatggagatgaaccaatggatttcaaaatcaacaccgatgagattatgacttcactcaagtctgttaatggacaaatagaaagcctcattagtcctgatggttctcgtaaaaaccccgctagaaactgcagagacctgaaattctgccatcctgaactcaagagtggagaatactgggttgaccctaaccaaggatgcaaattggatgctatcaaggtattctgtaatatggaaactggggaaacatgcataagtgccaatcctttgaatgttccacggaaacactggtggacagattctagtgctgagaagaaacacgtttggtttggagagtccatggatggtggttttcagtttagctacggcaatcctgaacttcctgaagatgtccttgatgtgcagctggcattccttcgacttctctccagccgagcttcccagaacatcacatatcactgcaaaaatagcattgcatacatggatcaggccagtggaaatgtaaagaaggccctgaagctgatggggtcaaatgaaggtgaattcaaggctgaaggaaatagcaaattcacctacacagttctggaggatggttgcacgaaacacactggggaatggagcaaaacagtctttgaatatcgaacacgcaaggctgtgagactacctattgtagatattgcaccctatgacattggtggtcctgatcaagaatttggtgtggacgttggccctgtttgctttttataaaccaaactctatctgaaatcccaacaaaaaaaatttaactccatatgtgttcctcttgttctaatcttgtcaaccagtgcaagtgaccgacaaaattccagttatttatttccaaaatgtttggaaacagtataatttgacaaagaaaaatgatacttctctttttttgctgttccaccaaatacaattcaaatgctttttgttttatttttttaccaattccaatttcaaaatgtctcaatggtgctataataaataaacttcaacactctttatgataaaaaaaaaaaaaaaa

SEQ ID NO: 3 - DNA, 881 bp, Homo sapiens
gtaatgcatccaggaagcctggaggcctgtggtttccgcacccgctgccacccccgcccctagcgtggacatttatcctctagcgctcaggccctgccgccatcgccgcagatccagcgcccagagagacaccagagaacccaccatggccccctttgagcccctggcttctggcatcctgttgttgctgtggctgatagcccccagcagggcctgcacctgtgtcccaccccacccacagacggccttctgcaattccgacctcgtcatcagggccaagttcgtggggacaccagaagtcaaccagaccaccttataccagcgttatgagatcaagatgaccaagatgtataaagggttccaagccttaggggatgccgctgacatccggttcgtctacacccccgccatggagagtgtctgcggatacttccacaggtcccacaaccgcagcgaggagtttctcattgctggaaaactgcaggatggactcttgcacatcactacctgcagtttcgtggctccctggaacagcctgagcttagctcagcgccggggcttcaccaagacctacactgttggctgtgaggaatgcacagtgtttccctgtttatccatcccctgcaaactgcagagtggcactcattgcttgtggacggaccagctcctccaaggctctgaaaagggcttccagtcccgtcaccttgcctgcctgcctcgggagccagggctgtgcacctggcagtccctgcggtcccagatagcctgaatcctgcccggagtggaagctgaagcctgcacagtgtccaccctgttcccactcccatctttcttccggacaatgaaataaagagttaccacccagcaaaaaaaaaaaaaaa

SEQ ID NO: 4 - DNA, 3661 bp, Homo sapiens
agcaaacacatccgtagaaggcagcgcggccgccgagagccgcagcgccgctcgcccgccgccccccaccccgccgccccgcccggcgaattgcgccccgcgcccctcccctcgcgcccccgagacaaagaggagagaaagtttgcgcggccgagcggggcaggtgaggagggtgagccgcgcgggaggggcccgcctcggccccggctcagcccccgcccgcgcccccagcccgccgccgcgagcagcgcccggaccccccagcggcggcccccgcccgcccagccccccggcccgccatgggcgccgcggcccgcaccctgcggctggcgctcggcctcctgctgctggcgacgctgcttcgcccggccgacgcctgcagctgctccccggtgcacccgcaacaggcgttttgcaatgcagatgtagtgatcagggccaaagcggtcagtgagaaggaagtggactctggaaacgacatttatggcaaccctatcaagaggatccagtatgagatcaagcagataaagatgttcaaagggcctgagaaggatatagagtttatctacacggccccctcctcggcagtgtgtggggtctcgctggacgttggaggaaagaaggaatatctcattgcaggaaaggccgagggggacggcaagatgcacatcaccctctgtgacttcatcgtgccctgggacaccctgagcaccacccagaagaagagcctgaaccacaggtaccagatgggctgcgagtgcaagatcacgcgctgccccatgatcccgtgctacatctcctccccggacgagtgcctctggatggactgggtcacagagaagaacatcaacgggcaccaggccaagttcttcgcctgcatcaagagaagtgacggctcctgtgcgtggtaccgcggcgcggcgccccccaagcaggagtttctcgacatcgaggacccataagcaggcctccaacgcccctgtggccaactgcaaaaaaagcctccaagggtttcgactggtccagctctgacatcccttcctggaaacagcatgaataaaacactcatcccatgggtccaaattaatatgattctgctccccccttctccttttagacatggttgtgggtctggagggagacgtgggtccaaggtcctcatcccatcctccctctgccaggcactatgtgtctggggcttcgatccttgggtgcaggcagggctgggacacgcggcttccctcccagtccctgccttggcaccgtcacagatgccaagcaggcagcacttagggatctcccagctgggttagggcagggcctggaaatgtgcattttgcagaaacttttgagggtcgttgcaagactgtgtagcaggcctaccaggtccctttcatcttgagagggacatggcccttgttttctgcagcttccacgcctctgcactccctgcccctggcaagtgctcccatcgccccggtgcccaccatgagctcccagcacctgactccccccacatccaagggcagcctggaaccagtggctagttcttgaaggagccccatcaatcctattaatcctcagaattccagtgggagcctccctctgagccttgtagaaatgggagcgagaaaccccagctgagctgcgttccagcctcagctgagtctttttggtctgcacccacccccccaccccccccccgcccacatgctccccagcttgcaggaggaatcggtgaggtcctgtcctgaggctgctgtccggggccggtggctgccctcaaggtcccttccctagctgctgcggttgccattgcttcttgcctgttctggcatcaggcacctggattgagttgcacagctttgctttatccgggcttgtgtgcagggcccggctgggctccccatctgcacatcctgaggacagaaaaagctgggtcttgctgtgccctcccaggcttagtgttccctccctcaaagactgacagccatcgttctgcacggggttttctgcatgtgacgccagctaagcatagtaagaagtccagcctaggaagggaaggattttggaggtaggtggctttggtgacacactcacttctttctcagcctccaggacactatggcctgttttaagagacatcttatttttctaaaggtgaattctcagatgataggtgaacctgagttgcagatataccaacttctgcttgtatttcttaaatgacaaagattacctagctaagaaacttcctagggaactagggaacctatgtgttccctcagtgtggtttcctgaagccagtgatatgggggttaggataggaagaactttctcggtaatgataaggagaatctcttgtttcctcccacctgtgttgtaaagataaactgacgatatacaggcacattatgtaaacatacacacgcaatgaaaccgaagcttggcggcctgggcgtggtcttgcaaaatgcttccaaagccaccttagcctgttctattcagcggcaaccccaaagcacctgttaagactcctgacccccaagtggcatgcagcccccatgcccaccgggacctggtcagcacagatcttgatgacttccctttctagggcagactgggagggtatccaggaatcggcccctgccccacgggcgttttcatgctgtacagtgacctaaagttggtaagatgtcataatggaccagtccatgtgatttcagtatatacaactccaccagacccctccaacccatataacaccccacccctgttcgcttcctgtatggtgatatcatatgtaacatttactcctgtttctgctgattgtttttttaatgttttggtttgtttttgacatcagctgtaatcattcctgtgctgtgttttttattacccttggtaggtattagacttgcacttttttaaaaaaaggtttctgcatcgtggaagcatttgacccagagtggaacgcgtggcctatgcaggtggattccttcaggtctttcctttggttctttgagcatctttgctttcattcgtctcccgtctttggttctccagttcaaattattgcaaagtaaaggatctttgagtaggttcggtctgaaaggtgtggcctttatatttgatccacacacgttggtcttttaaccgtgctgagcagaaaacaaaacaggttaagaagagccgggtggcagctgacagaggaagccgctcaaataccttcacaataaatagtggcaatatatatatagtttaagaaggctctccatttggcatcgtttaatttatatgttatgttctaagcacagctctcttctcctattttcatcctgcaagcaactcaaaatatttaaaataaagtttacattgtagttattttcaaatctttgcttgataagtattaagaaatattggacttgctgccgtaatttaaagctctgttgattttgtttccgtttggatttttgggggaggggagcactgtgtttatgctggaatatgaagtctgagaccttccggtgctgggaacacacaagagttgttgaaagttgacaagcagactgcgcatgtctctgatgctttgtatcattcttgagcaatcgctcggtccgtggacaataaacagtattatcaaagagaaaaaaaaaaaaaa

SEQ ID NO: 5 - DNA, 2285 bp, Homo sapiens
gcgcccgggccgccggccgggcccgggcctgggggcggggcgggaagacggcggccgggagtgttttcagttccgcctccaatcgcccattcccctcttcccctcccagccccctccatcccatcggaagaggaaggaacaaaaggtcccggaccccccggatctgacggggcgggacctggcgccaccttgcaggttcgatacaagaggctgttttcctagcgtggcttgctgcctttggtaagaacatgtcgtccatcttgccattcacgccgccagttgtgaagagactgctgggatggaagaagtcagctggtgggtctggaggagcaggcggaggagagcagaatgggcaggaagaaaagtggtgtgagaaagcagtgaaaagtctggtgaagaagctaaagaaaacaggacgattagatgagcttgagaaagccatcaccactcaaaactgtaatactaaatgtgttaccataccaagcacttgctctgaaatttggggactgagtacaccaaatacgatagatcagtgggatacaacaggcctttacagcttctctgaacaaaccaggtctcttgatggtcgtctccaggtatcccatcgaaaaggattgccacatgttatatattgccgattatggcgctggcctgatcttcacagtcatcatgaactcaaggcaattgaaaactgcgaatatgcttttaatcttaaaaaggatgaagtatgtgtaaacccttaccactatcagagagttgagacaccagttttgcctccagtattagtgccccgacacaccgagatcctaacagaacttccgcctctggatgactatactcactccattccagaaaacactaacttcccagcaggaattgagccacagagtaattatattccagaaacgccacctcctggatatatcagtgaagatggagaaacaagtgaccaacagttgaatcaaagtatggacacaggctctccagcagaactatctcctactactctttcccctgttaatcatagcttggatttacagccagttacttactcagaacctgcattttggtgttcgatagcatattatgaattaaatcagagggttggagaaaccttccatgcatcacagccctcactcactgtagatggctttacagacccatcaaattcagagaggttctgcttaggtttactctccaatgttaaccgaaatgccacggtagaaatgacaagaaggcatataggaagaggagtgcgcttatactacataggtggggaagtttttgctgagtgcctaagtgatagtgcaatctttgtgcagagccccaattgtaatcagagatatggctggcaccctgcaacagtgtgtaaaattccaccaggctgtaatctgaagatcttcaacaaccaggaatttgctgctcttctggctcagtctgttaatcagggttttgaagccgtctatcagctaactagaatgtgcaccataagaatgagttttgtgaaagggtggggagcagaataccgaaggcagacggtaacaagtactccttgctggattgaacttcatctgaatggacctctacagtggttggacaaagtattaactcagatgggatccccttcagtgcgttgctcaagcatgtcataaagcttcaccaatcaagtcccatgaaaagacttaatgtaacaactcttctgtcatagcattgtgtgtggtccctatggactgtttactatccaaaagttcaagagagaaaacagcacttgaggtctcatcaattaaagcaccttgtggaatctgtttcctatatttgaatattagatgggaaaattagtgtctagaaatactctcccattaaagaggaagagaagattttaaagacttaatgatgtcttattgggcataaaactgagtgtcccaaaggtttattaataacagtagtagttatgtgtacaggtaatgtatcatgatccagtatcacagtattgtgctgtttatatacatttttagtttgcatagatgaggtgtgtgtgtgcgctgcttcttgatctaggcaaacctttataaagttgcagtacctaatctgttattcccacttctctgttatttttgtgtgtcttttttaatatataatatatatcaagattttcaaattatttagaagcagattttcctgtagaaaaactaatttttctgccttttaccaaaaataaactcttgggggaagaaaaaaaaaaaaaaaaaaaaaaaaaaaaaaaaaaaaaaaaaaaaaaaaaaaaa

SEQ ID NO: 6 - DNA, 2485 bp, Homo sapiens
gccgtgggagccgctccgggcgcagggccgcgcgccgagccccgcaggctgcagcgccgcggcccggcccggcgccccggcaacttcgccgagagttgaggcgaagtttgggcgaccgcggcaggccccggccgagctcccctctgcgcccccggcgtcccgtcgagcccagccccgccgggggcgctcctcgccgcccgcgcgccctccccagccatgtcgtccatcctgcctttcactcccccgatcgtgaagcgcctgctgggctggaagaagggcgagcagaacgggcaggaggagaaatggtgcgagaaggcggtcaagagcctggtcaagaaactcaagaagacggggcagctggacgagctggagaaggccatcaccacgcagaacgtcaacaccaagtgcatcaccatccccaggtccctggatggccggttgcaggtgtcccatcggaaggggctccctcatgtcatctactgccgcctgtggcgatggccagacctgcacagccaccacgagctgcgggccatggagctgtgtgagttcgccttcaatatgaagaaggacgaggtctgcgtgaatccctaccactaccagagagtagagacaccagttctacctcctgtgttggtgccacgccacacagagatcccggccgagttccccccactggacgactacagccattccatccccgaaaacactaacttccccgcaggcatcgagccccagagcaatattccagagaccccaccccctggctacctgagtgaagatggagaaaccagtgaccaccagatgaaccacagcatggacgcaggttctccaaacctatccccgaatccgatgtccccagcacataataacttggacctgcagccagttacctactgcgagccggccttctggtgctccatctcctactacgagctgaaccagcgcgtcggggagacattccacgcctcgcagccatccatgactgtggatggcttcaccgacccctccaattcggagcgcttctgcctagggctgctctccaatgtcaacaggaatgcagcagtggagctgacacggagacacatcggaagaggcgtgcggctctactacatcggaggggaggtcttcgcagagtgcctcagtgacagcgctatttttgtccagtctcccaactgtaaccagcgctatggctggcacccggccaccgtctgcaagatcccaccaggatgcaacctgaagatcttcaacaaccaggagttcgctgccctcctggcccagtcggtcaaccagggctttgaggctgtctaccagttgacccgaatgtgcaccatccgcatgagcttcgtcaaaggctggggagcggagtacaggagacagactgtgaccagtaccccctgctggattgagctgcacctgaatgggcctttgcagtggcttgacaaggtcctcacccagatgggctccccaagcatccgctgttccagtgtgtcttagagacatcaagtatggtaggggagggcaggcttggggaaaatggccatgcaggaggtggagaaaattggaactctactcaacccattgttgtcaaggaagaagaaatctttctccctcaactgaaggggtgcacccacctgttttctgaaacacacgagcaaacccagaggtggatgttatgaacagctgtgtctgccaaacacatttaccctttggccccactttgaagggcaagaaatggcgtctgctctggtggcttaagtgagcagaacaggtagtattacaccaccggccccctccccccagactctttttttgagtgacagctttctgggatgtcacagtccaaccagaaacacccctctgtctaggactgcagtgtggagttcaccttggaagggcgttctaggtaggaagagcccgcagggccatgcagacctcatgcccagctctctgacgcttgtgacagtgcctcttccagtgaacattcccagcccagccccgccccgccccgccccaccactccagcagaccttgccccttgtgagctggatagacttgggatggggagggagggagttttgtctgtctccctcccctctcagaacatactgattgggaggtgcgtgttcagcagaacctgcacacaggacagcgggaaaaatcgatgagcgccacctctttaaaaactcacttacgtttgtcctttttcactttgaaaagttggaaggatctgctgaggcccagtgcatatgcaatgtatagtgtctattatcacattaatctcaaagagattcgaatgacggtaagtgttctcatgaagcaggaggcccttgtcgtgggatggcatttggtctcaggcagcaccacactgggtgcgtctccagtcatctgtaagagcttgctccagattctgatgcatacggctatattggtttatgtagtcagttgcattcattaaatcaactttatcataaaaaaaaaaaaaaaa

SEQ ID NO: 7 - DNA, 2334 bp, Homo sapiens
gctgagaggagacagccagtgcgactccaccctccagctcgacggcagccgccccggccgacagccccgagacgacagcccggcgcgtcccggtccccacctccgaccaccgccagcgctccaggccccgccgctccccgctcgccgccaccgcgccctccgctccgcccgcagtgccaaccatgaccgccgccagtatgggccccgtccgcgtcgccttcgtggtcctcctcgccctctgcagccggccggccgtcggccagaactgcagcgggccgtgccggtgcccggacgagccggcgccgcgctgcccggcgggcgtgagcctcgtgctggacggctgcggctgctgccgcgtctgcgccaagcagctgggcgagctgtgcaccgagcgcgacccctgcgacccgcacaagggcctcttctgtgacttcggctccccggccaaccgcaagatcggcgtgtgcaccgccaaagatggtgctccctgcatcttcggtggtacggtgtaccgcagcggagagtccttccagagcagctgcaagtaccagtgcacgtgcctggacggggcggtgggctgcatgcccctgtgcagcatggacgttcgtctgcccagccctgactgccccttcccgaggagggtcaagctgcccgggaaatgctgcgaggagtgggtgtgtgacgagcccaaggaccaaaccgtggttgggcctgccctcgcggcttaccgactggaagacacgtttggcccagacccaactatgattagagccaactgcctggtccagaccacagagtggagcgcctgttccaagacctgtgggatgggcatctccacccgggttaccaatgacaacgcctcctgcaggctagagaagcagagccgcctgtgcatggtcaggccttgcgaagctgacctggaagagaacattaagaagggcaaaaagtgcatccgtactcccaaaatctccaagcctatcaagtttgagctttctggctgcaccagcatgaagacataccgagctaaattctgtggagtatgtaccgacggccgatgctgcaccccccacagaaccaccaccctgccggtggagttcaagtgccctgacggcgaggtcatgaagaagaacatgatgttcatcaagacctgtgcctgccattacaactgtcccggagacaatgacatctttgaatcgctgtactacaggaagatgtacggagacatggcatgaagccagagagtgagagacattaactcattagactggaacttgaactgattcacatctcatttttccgtaaaaatgatttcagtagcacaagttatttaaatctgtttttctaactgggggaaaagattcccacccaattcaaaacattgtgccatgtcaaacaaatagtctatcaaccccagacactggtttgaagaatgttaagacttgacagtggaactacattagtacacagcaccagaatgtatattaaggtgtggctttaggagcagtgggagggtaccagcagaaaggttagtatcatcagatagcatcttatacgagtaatatgcctgctatttgaagtgtaattgagaaggaaaattttagcgtgctcactgacctgcctgtagccccagtgacagctaggatgtgcattctccagccatcaagagactgagtcaagttgttccttaagtcagaacagcagactcagctctgacattctgattcgaatgacactgttcaggaatcggaatcctgtcgattagactggacagcttgtggcaagtgaatttgcctgtaacaagccagattttttaaaatttatattgtaaatattgtgtgtgtgtgtgtgtgtgtatatatatatatatgtacagttatctaagttaatttaaagttgtttgtgcctttttatttttgtttttaatgctttgatatttcaatgttagcctcaatttctgaacaccataggtagaatgtaaagcttgtctgatcgttcaaagcatgaaatggatacttatatggaaattctgctcagatagaatgacagtccgtcaaaacagattgtttgcaaaggggaggcatcagtgtccttggcaggctgatttctaggtaggaaatgtggtagcctcacttttaatgaacaaatggcctttattaaaaactgagtgactctatatagctgatcagttttttcacctggaagcatttgtttctactttgatatgactgtttttcggacagtttatttgttgagagtgtgaccaaaagttacatgtttgcacctttctagttgaaaataaagtgtatattttttctataaaaaaaaaaaaaaaaa

SEQ ID NO: 8 - DNA, 1746 bp, Homo sapiens
cccagacctcgggcgcaccccctgcacgccgccttcatccccggcctgtctcctgagcccccgcgcatcctagaccctttctcctccaggagacggatctctctccgacctgccacagatcccctattcaagaccacccaccttctggtaccagatcgcgcccatctaggttatttccgtgggatactgagacacccccggtccaagcctcccctccaccactgcgcccttctccctgaggacctcagctttccctcgaggccctcctaccttttgccgggagacccccagcccctgcaggggcggggcctccccaccacaccagccctgttcgcgctctcggcagtgccggggggcgccgcctcccccatgccgccctccgggctgcggctgctgctgctgctgctaccgctgctgtggctactggtgctgacgcctggccggccggccgcgggactatccacctgcaagactatcgacatggagctggtgaagcggaagcgcatcgaggccatccgcggccagatcctgtccaagctgcggctcgccagccccccgagccagggggaggtgccgcccggcccgctgcccgaggccgtgctcgccctgtacaacagcacccgcgaccgggtggccggggagagtgcagaaccggagcccgagcctgaggccgactactacgccaaggaggtcacccgcgtgctaatggtggaaacccacaacgaaatctatgacaagttcaagcagagtacacacagcatatatatgttcttcaacacatcagagctccgagaagcggtacctgaacccgtgttgctctcccgggcagagctgcgtctgctgaggctcaagttaaaagtggagcagcacgtggagctgtaccagaaatacagcaacaattcctggcgatacctcagcaaccggctgctggcacccagcgactcgccagagtggttatcttttgatgtcaccggagttgtgcggcagtggttgagccgtggaggggaaattgagggctttcgccttagcgcccactgctcctgtgacagcagggataacacactgcaagtggacatcaacgggttcactaccggccgccgaggtgacctggccaccattcatggcatgaaccggcctttcctgcttctcatggccaccccgctggagagggcccagcatctgcaaagctcccggcaccgccgagccctggacaccaactattgcttcagctccacggagaagaactgctgcgtgcggcagctgtacattgacttccgcaaggacctcggctggaagtggatccacgagcccaagggctaccatgccaacttctgcctcgggccctgcccctacatttggagcctggacacgcagtacagcaaggtcctggccctgtacaaccagcataacccgggcgcctcggcggcgccgtgctgcgtgccgcaggcgctggagccgctgcccatcgtgtactacgtgggccgcaagcccaaggtggagcagctgtccaacatgatcgtgcgctcctgcaagtgcagctgaggtcccgccccgccccgccccgccccggcaggcccggccccaccccgccccgcccccgctgccttgcccatgggggctgtatttaaggacacccgtgccccaagcccacctggggccccattaaagatggagagaggaaaaaaaaaaaaaaaaaaaaaaaaaaaaaaaaaaaaaaaaaaaaaaaaaaaaaaaaaaaaaaaaaaa

SEQ ID NO: 9 - DNA, 2345 bp, Homo sapiens
ctctcctccagcctctcacactctcctcagctctctcatctcctggaaccatggccagcacatccaccaccatcaggagccacagcagcagccgccggggtttcagtgccagctcagccaggctccctggggtcagccgctctggcttcagcagcgtctccgtgtcccgctccaggggcagtggtggcctgggtggtgcatgtggaggagctggctttggcagccgcagtctgtatggcctggggggctccaagaggatctccattggagggggcagctgtgccatcagtggcggctatggcagcagagccggaggcagctatggctttggtggcgccgggagtggatttggtttcggtggtggagccggcattggctttggtctgggtggtggagccggccttgctggtggctttgggggccctggcttccctgtgtgcccccctggaggcatccaagaggtcaccgtcaaccagagtctcctgactcccctcaacctgcaaatcgatcccaccatccagcgggtgcgggccgaggagcgtgaacagatcaagaccctcaacaacaagtttgcctccttcatcgacaaggtgcggttcctggagcagcagaacaaggttctggaaacaaagtggaccctgctgcaggagcagggcaccaagactgtgaggcagaacctggagccgttgttcgagcagtacatcaacaacctcaggaggcagctggacagcattgtcggggaacggggccgcctggactcagagctcagaggcatgcaggacctggtggaggacttcaagaacaaatatgaggatgaaatcaacaagcgcacagcagcagagaatgaatttgtgactctgaagaaggacgtggatgctgcctacatgaacaaggttgaactgcaagccaaggcagacactctcacagacgagatcaacttcctgagagccttgtatgatgcagagctgtcccagatgcagacccacatctcagacacatctgtggtgctgtccatggacaacaaccgcaacctggacctggacagcatcatcgctgaggtcaaggcccaatatgaggagattgctcagagaagccgggctgaggctgagtcctggtaccagaccaagtacgaggagctgcaggtcacagcaggcagacatggggacgacctgcgcaacaccaagcaggagattgctgagatcaaccgcatgatccagaggctgagatctgagatcgaccacgtcaagaagcagtgcgccaacctgcaggccgccattgctgatgctgagcagcgtggggagatggccctcaaggatgccaagaacaagctggaagggctggaggatgccctgcagaaggccaagcaggacctggcccggctgctgaaggagtaccaggagctgatgaatgtcaagctggccctggacgtggagatcgccacctaccgcaagctgctggagggtgaggagtgcaggctgaatggcgaaggcgttggacaagtcaacatctctgtggtgcagtccaccgtctccagtggctatggcggtgccagtggtgtcggcagtggcttaggcctgggtggaggaagcagctactcctatggcagtggtcttggcgttggaggtggcttcagttccagcagtggcagagccattgggggtggcctcagctctgttggaggcggcagttccaccatcaagtacaccaccacctcctcctccagcaggaagagctataagcactaaagtgcgtctgctagctctcggtcccacagtcctcaggcccctctctggctgcagagccctctcctcaggttgcctgtcctctcctggcctccagtctcccctgctgtcccaggtagagctggggatgaatgcttagtgccttcacttcttctctctctctctataccatctgagcacccattgctcaccatcagatcaacctctgattttacatcatgatgtaatcaccactggagcttcactttgttactaaattattaatttcttgcctccagtgttctatctctgaggctgagcattataagaaaatgacctctgctccttttcattgcagaaaattgccaggggcttatttcagaacaacttccacttactttccactggctctcaaactctctaacttataagtgttgtgaacccccacccaggcagtatccatgaaagcacaagtgactagtcctatgatgtacaaagcctgtatctctgtgatgatttctgtgctcttcgctctttgcaattgctaaataaagcagatttataatacaataaaaaaaaaaaaaaaaaaaaaaaaaaaaaaaaaaaaaaaaaaaaaaaaaaaaa

SEQ ID NO: 10 - DNA, 2358 bp, Homo sapiens
tcccgcaagcgccggcggcagcatggccagctctggttccctgagggtttcaaagtgtcagaggccagcaagaagaagcggagagagcccctcggcgaggactcagtcggcctcaagcccctgaagaatgcctcagatggtgctctgatggacgacaatcagaacgagtggggagacgaagacctggagaccaagaagttccggtttgaggagccagtagttctccctgacctgagtgatcagactgaccacaggcagtggacccagcagcacctggacgctgctgacctgcgcatgtctgccatggccccaacaccgcctcagggggaggtggatgctgactgcatggatgtcaatgttcgaggaccagatggcttcacacccctcatgattgcctcctgcagtggagggggccttgagacaggcaacagtgaagaagaagaagatgcacctgctgtcatctctgacttcatctaccagggcgccagcttgcacaaccagacagaccgcaccggggagaccgccttgcacttggctgcccgatactctcgttcagatgctgcaaagcgcttgctggaggccagtgcagatgccaacatccaggacaacatgggccgtactccgttacatgcagcagtttctgcagatgctcagggtgtcttccagatcctgctccggaacagggccacagatctggatgcccgaatgcatgatggcacaactccactgatcctggctgcgcgcctggccgtggagggcatgctggaggacctcatcaactcacatgctgacgtcaatgccgtggatgacctaggcaagtcggctttgcattgggcggccgcggtgaacaatgtggatgctgctgttgtgctcctgaagaacggagccaacaaggacatgcagaacaacaaggaggagactcccctgttcctggccgcccgtgagggcagctatgagactgccaaagtgttgctggaccactttgccaaccgggacatcacggatcacatggaccgattgccgcgggacatcgcacaggagcgtatgcaccacgatatcgtgcggcttttggatgagtacaacctggtgcgcagcccacagctgcatggcactgccctgggtggcacacccactctgtctcccacactctgctcgcccaatggctacctgggcaatctcaagtctgccacacagggcaagaaggcccgcaagcccagcaccaaagggctggcttgtggtagcaaggaagctaaggacctcaaggcacggaggaagaagtcccaggatggcaagggctgcctgttggacagctcgagcatgctgtcgcctgtggactccctcgagtcaccccatggctacttgtcagatgtggcctcgccacccctcctcccctccccattccagcagtctccatccatgcctctcagccacctgcctggtatgcctgacactcacctgggcatcagccacttgaatgtggcagccaagcctgagatggcagcactggctggaggtagccggttggcctttgagccacccccgccacgcctctcccacctgcctgtagcctccagtgccagcacagtgctgagtaccaatggcacgggggctatgaatttcaccgtgggtgcaccggcaagcttgaatggccagtgtgagtggcttccccggctccagaatggcatggtgcccagccagtacaacccactacggccgggtgtgacgccgggcacactgagcacacaggcagctggcctccagcatagcatgatggggccactacacagcagcctctccaccaataccttgtccccgattatttaccagggcctgcccaacacacggctggcaacacagcctcacctggtgcagacccagcaggtgcagccacagaacttacagctccagcctcagaacctgcagccaccatcacagccacacctcagtgtgagctcggcagccaatgggcacctgggccggagcttcttgagtggggagcccagtcaggcagatgtacaaccgctgggccccagcagtctgcctgtgcacaccattctgccccaggaaagccaggccctgcccacatcactgccatcctccatggtcccacccatgaccactacccagttcctgacccctccttcccagcacagttactcctcctcccctgtggacaacacccccagccaccagctgcaggtgccagagcaccccttcctcaccccatcccctgagtcccctgaccagtggtccagctcctccccgcattccaacatctctgattggtccgagggcatctccagcccgcccaccaccatgccgtcccagatcacccacattccagaggcatttaaataa

SEQ ID NO: 11 - DNA, 3188 bp, Mus musculus
catcaatgctacttaacatgtgttcatgggcaagtcatatttaggagtatgtgctaccataacaattgtgcatgtgcacacacacacactcacatatttcactaatgagtagtttgggcataaatttgaaagagagcagggagggttataagtgagggtttggagggaggaaacggatggggaaatgtgggacctggcagtgctagattgcttaccttactacaccgagaagccttttcctcagtaatagtgtgctctatttttggtcattccattatgctctagatataaagtgcaaaagtctaaagaactttcccattgacacacatctgtctgtcaggttgaatttgaacaccaagccccagactgctgtttgggtctgaaggaaggccggccattctcaggagtcactgcatgtttggacttctctgctcattcccacagagaccagcagaacatgccaaatggcagtacagtggtggtcaccctcaatagagaagacaatcgagaagtcggagctaagcctgaggatgagcagttccacgtgctgcctatgtacatcatcgcccctgaggatgagtttgggagtacggaaggccaggagaagaagatacggatggggtccattgaggttctgcagtcatttcggaggagaagggtcataaggataggagagctgcccaagagttgcaagaagaaagcggagcccaagaaagccaagaccaagaaagcagctcgaaagcgttcctctctggagaactgctccagtaggactgagaagggaaagtcttcctcacatacaaagctgatggaaaatgcaagccatatgaaacaaatgacagcacaaccgcagctttcgggcccggtcatccggcagccaccaacactccagaggcaccttcagcaagggcagaggccacagcagccgcagccacctcagccgcagccgcagacgacacctcagccacagccacagccacagcatatcatgcccggtaactctcagtctgttggttctcattgttctggatccaccagtgtctacacgagacagcctactcctcacagtccttatcccagctcagcacacacctcagatatttatggagataccaaccatgtgaacttttaccccacttcatctcatgcctcgggttcatatttgaatccttctaattacatgaacccctaccttgggcttttgaatcagaataaccaatatgcaccttttccatacaatgggagtgtgccagtggacaatggttcccctttcttaggttcttattccccccaggctcagtccagggatctacatagatatccaaaccaggaccatctcaccaatcagaacttaccacccatccacacccttcaccaacagacgtttggggacagtccctctaagtacttaagttatggaaaccaaaatatgcagagagatgccttcactactaactccaccctaaaaccaaatgtacaccacctagcaacgttttctccttaccccacccccaagatggatagtcatttcatgggagctgcctccagatcaccatacagccacccacacactgactacaaaaccagtgagcatcatctaccctctcacacgatctacagctacacggcagcagcttcggggagcagttccagccacgccttccacaacaaggagaatgacaacatagccaatgggctctcaagagtgcttccagggtttaatcatgatagaactgcttctgcccaagaactattatacagtctgactggcagcagtcaggagaagcagcctgaggtgtcaggccaggatgcagctgctgtgcaggaaattgagtattggtcagatagtgagcacaactttcaggatccttgcattggaggggtggctatagctccaactcatgggtcaattcttattgagtgtgcaaagtgtgaggttcatgccacaaccaaagtaaacgatcccgaccggaatcaccccaccaggatctcacttgtactgtataggcataagaatttgtttctaccaaaacattgtttggctctctgggaagccaaaatggctgaaaaggcccggaaagaggaagagtgcggaaagaatggatcagaccacgtgtctcagaaaaatcatggcaaacaggaaaagcgtgagcccacagggccacaggaacccagttacctgcgtttcatccagtctcttgctgagaacacagggtctgtgactacggattctaccgtgactacatcaccatatgctttcactcaggtcacagggccttacaacacatttgtatgacgctggccattaggccagaccaccaaggacgacctgtgagcagtatgtctttcatggcatgggccgtagggacaggtcacagcatctgtgacaaatgcagtgtgtgtttgtgtgtatgtttattgggggggggctgtcagctcaccagcaaaatagtttattttatcattatatttaatctctcccgtggtccatggtggcattcaggaagagcatcctatgcaagggcacagtgggaaggaagcgctggacatttgtcttgaaaaccactggttctcttattggctgaggtcatgcgtgtgccatgcccctcagcactctacacgtaactgcttctagtactcagcgtgtgtaaccgtgggacacagcgctgtagtagagcagttgcaggatcatctggtgctgacgtatgatgtactgaagaaatactggaactaagactttttaacatgcaggttttttactgtaatcttaataacttatttatcaaagtagctacagaaagcttaagtgaataatggcaaaacactgaatctgtttgggtgttaacattaaatggtgctacaaatggtgtttttaatagctgaaaaatcaatgccttctatcatctagccagtgtggtcgagggccctggaggcactggggtacctctgattttacatttctatcttaattattcagcttagtttttaaaatgtggacatttcaaaggcctctggattgtagttatccaccgatgtccttgtaggactataatgtatagatatgcacacttacacatgtgtactgaaatattttaagttgtgtcttagaaaagcactttgcctacctaagctttggcaacttgggcaatgctaaggtactaaaacataaaaacaaaaaaaaaaaaaaa

SEQ ID NO: 12 - DNA, 3251 bp, Homo sapiens
ggccccacggtcgcctctatccgggaactcatggaggagcggtatggagagaaggggaaagccatccggatcgagaaggtcatctacacggggaaggagggaaagagctcccgcggttgccccattgcaaagtgggtgatccgcaggcacacgctggaggagaagctactctgcctggtgcggcaccgggcaggccaccactgccagaacgctgtgatcgtcatcctcatcctggcctgggagggcattccccgtagcctcggagacaccctctaccaggagctcaccgacaccctccggaagtatgggaaccccaccagccggagatgcggcctcaacgatgaccggacctgcgcttgccaaggcaaagaccccaacacctgtggtgcctccttctcctttggttgttcctggagcatgtacttcaacggctgcaagtatgctcggagcaagacacctcgcaagttccgcctcgcaggggacaatcccaaagaggaagaagtgctccggaagagtttccaggacctggccaccgaagtcgctcccctgtacaagcgactggcccctcaggcctatcagaaccaggtgaccaacgaggaaatagcgattgactgccgtctggggctgaaggaaggacggcccttcgcgggggtcacggcctgcatggacttctgtgcccacgcccacaaggaccagcataacctctacaatgggtgcaccgtggtctgcaccctgaccaaggaagacaatcgctgcgtgggcaagattcccgaggatgagcagctgcatgttctccccctgtacaagatggccaacacggatgagtttggtagcgaggagaaccagaatgcaaaggtgggcagcggagccatccaggtgctcaccgccttcccccgcgaggtccgacgcctgcccgagcctgccaagtcctgccgccagcggcagctggaagccagaaaggcagcagccgagaagaagaagattcagaaggagaagctgagcactccggagaagatcaagcaggaggccctggagctggcgggcattacgtcggacccaggcctgtctctgaagggtggattgtcccagcaaggcctgaagccctccctcaaggtggagccgcagaaccacttcagctccttcaagtacagcggcaacgcggtggtggagagctactcggtgctgggcaactgccggccctccgacccttacagcatgaacagcgtgtactcctaccactcctactatgcacagcccagcctgacctccgtcaatggcttccactccaagtacgctctcccgtcttttagctactatggctttccatccagcaaccccgtcttcccctctcagttcctgggtcctggtgcctgggggcatagtggcagcagtggcagttttgagaagaagccagacctccacgctctgcacaacagcctgagcccggcctacggtggtgctgagtttgccgagctgcccagccaggctgttcccacagacgcccaccaccccactcctcaccaccagcagcctgcgtacccaggccccaaggagtatctgcttcccaaggcccccctactccactcagtgtccagggacccctccccctttgcccagagctccaactgctacaacagatccatcaagcaagagccagtagacccgctgacccaggctgagcctgtgcccagagacgctggcaagatgggcaagacacctctgtccgaggtgtctcagaatggaggacccagtcacctttggggacagtactcaggaggcccaagcatgtcccccaagaggactaacggtgtgggtggcagctggggtgtgttctcgtctggggagagtcctgccatcgtccctgacaagctcagttcctttggggccagctgcctggccccttcccacttcacagatggccagtgggggctgttccccggtgaggggcagcaggcagcttcccactctggaggacggctgcgaggcaaaccgtggagcccctgcaagtttgggaacagcacctcggccttggctgggcccagcctgactgagaagccgtgggcgctgggggcaggggatttcaactcggccctgaaaggtagtcctgggttccaagacaagctgtggaaccccatgaaaggagaggagggcaggattccagccgcaggggccagccagctggacagggcctggcagtcctttggtctgcccctgggatccagcgagaagctgtttggggctctgaagtcagaggagaagctgtgggaccccttcagcctggaggaggggccggctgaggagccccccagcaagggagcggtgaaggaggagaagggcggtggtggtgcggaggaggaagaggaggagctgtggtcggacagtgaacacaacttcctggacgagaacatcggcggcgtggccgtggccccagcccacggctccatcctcatcgagtgtgcccggcgggagctgcacgccaccacgccgcttaagaagcccaaccgctgccaccccacccgcatctcgctggtcttctaccagcacaagaacctcaaccagcccaaccacgggctggccctctgggaagccaagatgaagcagctggcggagagggcacgggcacggcaggaggaggctgcccggctgggcctgggccagcaggaggccaagctctacgggaagaagcgcaagtgggggggcactgtggttgctgagccccagcagaaagagaagaagggggtcgtccccacccggcaggcactggctgtgcccacagactcggcggtcaccgtgtcctcctatgcctacacgaaggtcactggcccctacagccgctggatctaggtgccagggagccagcgtacctcagcgtcgggcctggcccgagctgtctctgtggtgcttttgccctcatacctgggggcgggttgggggtgcagaagtctttttatctctatatacatatatagatgcgcatatcatatatatgtatttatggtccaaacctcagaactgacccgcccctcccttacccccacttccccagcactttgaagaagaaactacggctgtcgggtgatttttccgtgatcttaatatttatatctccaagttgtcccccccccttgtctggggggtttttatttttattttctctttgtttttaaaactctatccttgtatatcacaataatggaaagaaagtttatagtatcctttcacaaaggagtagttttaaaaaaaaaaaaaaa

SEQ ID NO: 13 - DNA, 3691 bp, Homo sapiens
aagacgacgacgacgagggcgaggaggaggaagaggcggcggcggcggcgattgggtaccgagataaccttctgttcggtgatgaaattatcactaatggttttcattcctgtgaaagtgatgaggaggatagagcctcacatgcaagctctagtgactggactccaaggccacggataggtccatatacttttgtccagcaacatcttatgattggcacagatcctcgaacaattcttaaagatttattgccggaaacaatacctccacctgagttggatgatatgacactgtggcagattgttattaatatcctttcagaaccaccaaaaaggaaaaaaagaaaagatattaatacaattgaagatgctgtgaaattactgcaagagtgcaaaaaaattatagttctaactggagctggggtgtctgtttcatgtggaatacctgacttcaggtcaagggatggtatttatgctcgccttgctgtagacttcccagatcttccagatcctcaagcgatgtttgatattgaatatttcagaaaagatccaagaccattcttcaagtttgcaaaggaaatatatcctggacaattccagccatctctctgtcacaaattcatagccttgtcagataaggaaggaaaactacttcgcaactatacccagaacatagacacgctggaacaggttgcgggaatccaaaggataattcagtgtcatggttcctttgcaacagcatcttgcctgatttgtaaatacaaagttgactgtgaagctgtacgaggagctctttttagtcaggtagttcctcgatgtcctaggtgcccagctgatgaaccgcttgctatcatgaaaccagagattgtgttttttggtgaaaatttaccagaacagtttcatagagccatgaagtatgacaaagatgaagttgacctcctcattgttattgggtcttccctcaaagtaagaccagtagcactaattccaagttccataccccatgaagtgcctcagatattaattaatagagaacctttgcctcatctgcattttgatgtagagcttcttggagactgtgatgtcataattaatgaattgtgtcataggttaggtggtgaatatgccaaactttgctgtaaccctgtaaagctttcagaaattactgaaaaacctccacgaacacaaaaagaattggcttatttgtcagagttgccacccacacctcttcatgtttcagaagactcaagttcaccagaaagaacttcaccaccagattcttcagtgattgtcacacttttagaccaagcagctaagagtaatgatgatttagatgtgtctgaatcaaaaggttgtatggaagaaaaaccacaggaagtacaaacttctaggaatgttgaaagtattgctgaacagatggaaaatccggatttgaagaatgttggttctagtactggggagaaaaatgaaagaacttcagtggctggaacagtgagaaaatgctggcctaatagagtggcaaaggagcagattagtaggcggcttgatggtaatcagtatctgtttttgccaccaaatcgttacattttccatggcgctgaggtatattcagactctgaagatgacgtcttatcctctagttcttgtggcagtaacagtgatagtgggacatgccagagtccaagtttagaagaacccatggaggatgaaagtgaaattgaagaattctacaatggcttagaagatgagcctgatgttccagagagagctggaggagctggatttgggactgatggagatgatcaagaggcaattaatgaagctatatctgtgaaacaggaagtaacagacatgaactatccatcaaacaaatcatagtgtaataattgtgcaggtacaggaattgttccaccagcattaggaactttagcatgtcaaaatgaatgtttacttgtgaactcgatagagcaaggaaaccagaaaggtgtaatatttataggttggtaaaatagattgtttttcatggataatttttaacttcattatttctgtacttgtacaaactcaacactaacttttttttttttaaaaaaaaaaaggtactaagtatcttcaatcagctgttggtcaagactaactttcttttaaaggttcatttgtatgataaattcatatgtgtatatataatttttttttgttttgtctagtgagtttcaacatttttaaagttttcaaaaagccatcggaatgttaaattaatgtaaagggaacagctaatctagaccaaagaatggtattttcacttttctttgtaacattgaatggtttgaagtactcaaaatctgttacgctaaacttttgattctttaacacaattatttttaaacactggcattttccaaaactgtggcagctaactttttaaaatctcaaatgacatgcagtgtgagtagaaggaagtcaacaatatgtggggagagcactcggttgtctttacttttaaaagtaatacttggtgctaagaatttcaggattattgtatttacgttcaaatgaagatggcttttgtacttcctgtggacatgtagtaatgtctatattggctcataaaactaacctgaaaaacaaataaatgctttggaaatgtttcagttgctttagaaacattagtgcctgcctggatccccttagttttgaaatatttgccattgttgtttaaatacctatcactgtggtagagcttgcattgatcttttccacaagtattaaactgccaaaatgtgaatatgcaaagcctttctgaatctataataatggtacttctactggggagagtgtaatattttggactgctgttttccattaatgaggagagcaacaggcccctgattatacagttccaaagtaataagatgttaattgtaattcagccagaaagtacatgtctcccattgggaggatttggtgttaaataccaaactgctagccctagtattatggagatgaacatgatgatgtaacttgtaatagcagaatagttaatgaatgaaactagttcttataatttatctttatttaaaagcttagcctgccttaaaactagagatcaactttctcagctgcaaaagcttctagtctttcaagaagttcatactttatgaaattgcacagtaagcatttatttttcagaccatttttgaacatcactcctaaattaataaagtattcctctgttgctttagtatttattacaataaaaagggtttgaaatatagctgttctttatgcataaaacacccagctaggaccattactgccagagaaaaaaatcgtattgaatggccatttccctacttataagatgtctcaatctgaatttatttggctacactaaagaatgcagtatatttagttttccatttgcatgatgtttgtgtgctatagatgatattttaaattgaaaagtttgttttaaattatttttacagtgaagactgttttcagctctttttatattgtacatagtcttttatgtaatttactggcatatgttttgtagactgtttaatgactggatatcttccttcaacttttgaaatacaaaaccagtgttttttacttgtacactgttttaaagtctattaaaattgtcatttgacttttttctgttaacttaaaaaaaaaaaaaaaaa

SEQ ID NO: 14 - DNA, 1585 bp, Homo sapiens
ggcagtcgaggatgtcggtgaattacgcggcggggctgtcgccgtacgcggacaagggcaagtgcggcctcccggagatcttcgaccccccggaggagctggagcggaaggtgtgggaactggcgaggctggtctggcagtcttccaatgtggtgttccacacgggtgccggcatcagcactgcctctggcatccccgacttcaggggtccccacggagtctggaccatggaggagcgaggtctggcccccaagttcgacaccacctttgagagcgcgcggcccacgcagacccacatggcgctggtgcagctggagcgcgtgggcctcctccgcttcctggtcagccagaacgtggacgggctccatgtgcgctcaggcttccccagggacaaactggcagagctccacgggaacatgtttgtggaagaatgtgccaagtgtaagacgcagtacgtccgagacacagtcgtgggcaccatgggcctgaaggccacgggccggctctgcaccgtggctaaggcaagggggctgcgagcctgcaggaacgccgacctgtccatcacgctgggtacatcgctgcagatccggcccagcgggaacctgccgctggctaccaagcgccggggaggccgcctggtcatcgtcaacctgcagcccaccaagcacgaccgccatgctgacctccgcatccatggctacgttgacgaggtcatgacccggctcatgaagcacctggggctggagatccccgcctgggacggcccccgtgtgctggagagggcgctgccacccctgccccgcccgcccacccccaagctggagcccaaggaggaatctcccacccggatcaacggctctatccccgccggccccaagcaggagccctgcgcccagcacaacggctcagagcccgccagccccaaacgggagcggcccaccagccctgccccccacagaccccccaaaagggtgaaggccaaggcggtccccagctgaccagggtgcttggggagggtggggctttttgtagaaactgtggattctttttctctcgtggtctcactttgttacttgtttctgtccccgggagcctcagggctctgagagctgtgctccaggccaggggttacacctgccctccgtggtccctccctgggctccaggggcctctggtgcggttccgggaagaagccacaccccagaggtgacagctgagcccctgccacaccccagcctctgacttgctgtgttgtccagaggtgaggctgggccctccctggtctccagcttaaacaggagtgaactccctctgtccccagggcctcccttctgggccccctacagcccaccctacccctcctccatgggccctgcaggaggggagacccaccttgaagtgggggatcagtagaggcttgcactgcctttggggctggagggagacgtgggtccaccaggcttctggaaaagtcctcaatgcaataaaaacaatttctttcttgcaaaaaaaaaaaaaaaaaaaaaaaaaaaaaaaaaaaaaaaaaaaaaaaaaaaaaaaaaaaaaaaaaaaaaaaaaaaaaaaa

SEQ ID NO: 15 - DNA, 2669 bp, Homo sapiens
ggggacggccttcccactgggaacacaaacttgctggcgggaagagcccggaaagaaacctgtggatctcccttcgagatcatccaaagagaagaaaggtgacctcacattcgtgccccttagcagcactctgcagaaatgcctcctcagctgcaaaacggcctgaacctctcggccaaagttgtccagggaagcctggacagcctgccccaggcagtgagggagtttctcgagaataacgctgagctgtgtcagcctgatcacatccacatctgtgacggctctgaggaggagaatgggcggcttctgggccagatggaggaagagggcatcctcaggcggctgaagaagtatgacaactgctggttggctctcactgaccccagggatgtggccaggatcgaaagcaagacggttatcgtcacccaagagcaaagagacacagtgcccatccccaaaacaggcctcagccagctcggtcgctggatgtcagaggaggattttgagaaagcgttcaatgccaggttcccagggtgcatgaaaggtcgcaccatgtacgtcatcccattcagcatggggccgctgggctcacctctgtcgaagatcggcatcgagctgacggattcgccctacgtggtggccagcatgcggatcatgacgcggatgggcacgcccgtcctggaagcactgggcgatggggagtttgtcaaatgcctccattctgtggggtgccctctgcctttacaaaagcctttggtcaacaactggccctgcaacccggagctgacgctcatcgcccacctgcctgaccgcagagagatcatctcctttggcagtgggtacggcgggaactcgctgctcgggaagaagtgctttgctctcaggatggccagccggctggccaaggaggaagggtggctggcagagcacatgctggttctgggtataaccaaccctgagggtgagaagaagtacctggcggccgcatttcccagcgcctgcgggaagaccaacctggccatgatgaaccccagcctccccgggtggaaggttgagtgcgtcggggatgacattgcctggatgaagtttgacgcacaaggtcatttaagggccatcaacccagaaaatggctttttcggtgtcgctcctgggacttcagtgaagaccaaccccaatgccatcaagaccatccagaagaacacaatctttaccaatgtggccgagaccagcgacgggggcgtttactgggaaggcattgatgagccgctagcttcaggtgtcaccatcacgtcctggaagaataaggagtggagctcagaggatggggaaccttgtgcccaccccaactcgaggttctgcacccctgccagccagtgccccatcattgatgctgcctgggagtctccggaaggtgttcccattgaaggcattatctttggaggccgtagacctgctggtgtccctctagtctatgaagctctcagctggcaacatggagtctttgtgggggcggccatgagatcagaggccacagcggctgcagaacataaaggcaaaatcatcatgcatgacccctttgccatgcggcccttctttggctacaacttcggcaaatacctggcccactggcttagcatggcccagcacccagcagccaaactgcccaagatcttccatgtcaactggttccggaaggacaaggaaggcaaattcctctggccaggctttggagagaactccagggtgctggagtggatgttcaaccggatcgatggaaaagccagcaccaagctcacgcccataggctacatccccaaggaggatgccctgaacctgaaaggcctggggcacatcaacatgatggagcttttcagcatctccaaggaattctgggagaaggaggtggaagacatcgagaagtatctggaggatcaagtcaatgccgacctcccctgtgaaatcgagagagagatccttgccttgaagcaaagaataagccagatgtaatcagggcctgagtgctttacctttaaaatcattccctttcccatccataaggtgcagtaggagcaagagagggcaagtgttcccaaattgacgccaccataataatcatcaccacaccgggagcagatctgaaaggcacactttgatttttttaaggataagaaccacagaacactgggtagtagctaatgaaattgagaagggaaatcttagcatgcctccaaaaattcacatccaatgcatagtttgttcaaatttaaggttactcaggcattgatcttttcagtgttttttcactttagctatgtggattagctagaatgcacaccaaaaaaatacttgagctgtatatatatgtgtgtgtgtgtgtgtgtgtgtgtgtgcatgtatgtgcacatgtgtctgtgtggtatatttgtgtatgtgtatttgtatgtactgttattgaaaatatatttaatacctttggaaaaatcttgggcaagatgacctactagttttccttgaaaaaaagttgctttgttattaatattgtgcttaaattatttttatacaccattgttccttacctttacataattgcaatatttcccccttactacttcttggaaaaaaattacaaaatgaagttttaaaaaaaaaaaaaaaaaaaaaaaaaaaaa

SEQ ID NO: 16 - DNA, 1767 bp, Homo sapiens
ccagaagcctgcatttctgcattctgcttaattccctttccttagatttgaaagaagccaacactaaaccacaaatatacaacaaggccattttctcaaacgagagtcagcctttaacgaaatgaccatggttgacacagagatgccattctggcccaccaactttgggatcagctccgtggatctctccgtaatggaagaccactcccactcctttgatatcaagcccttcactactgttgacttctccagcatttctactccacattacgaagacattccattcacaagaacagatccagtggttgcagattacaagtatgacctgaaacttcaagagtaccaaagtgcaatcaaagtggagcctgcatctccaccttattattctgagaagactcagctctacaataagcctcatgaagagccttccaactccctcatggcaattgaatgtcgtgtctgtggagataaagcttctggatttcactatggagttcatgcttgtgaaggatgcaagggtttcttccggagaacaatcagattgaagcttatctatgacagatgtgatcttaactgtcggatccacaaaaaaagtagaaataaatgtcagtactgtcggtttcagaaatgccttgcagtggggatgtctcataatgccatcaggtttgggcggatgccacaggccgagaaggagaagctgttggcggagatctccagtgatatcgaccagctgaatccagagtccgctgacctccgggccctggcaaaacatttgtatgactcatacataaagtccttcccgctgaccaaagcaaaggcgagggcgatcttgacaggaaagacaacagacaaatcaccattcgttatctatgacatgaattccttaatgatgggagaagataaaatcaagttcaaacacatcacccccctgcaggagcagagcaaagaggtggccatccgcatctttcagggctgccagtttcgctccgtggaggctgtgcaggagatcacagagtatgccaaaagcattcctggttttgtaaatcttgacttgaacgaccaagtaactctcctcaaatatggagtccacgagatcatttacacaatgctggcctccttgatgaataaagatggggttctcatatccgagggccaaggcttcatgacaagggagtttctaaagagcctgcgaaagccttttggtgactttatggagcccaagtttgagtttgctgtgaagttcaatgcactggaattagatgacagcgacttggcaatatttattgctgtcattattctcagtggagaccgcccaggtttgctgaatgtgaagcccattgaagacattcaagacaacctgctacaagccctggagctccagctgaagctgaaccaccctgagtcctcacagctgtttgccaagctgctccagaaaatgacagacctcagacagattgtcacggaacacgtgcagctactgcaggtgatcaagaagacggagacagacatgagtcttcacccgctcctgcaggagatctacaaggacttgtactagcagagagtcctgagccactgccaacatttcccttcttccagttgcactattctgagggaaaatctgacacctaagaaatttactgtgaaaaagcattttaaaaagaaaaggttttagaatatgatctattttatgcatattgtttataaagacacatttacaatttacttttaatattaaaaattaccatattatgaaaaaaaaaaaaaaaa

SEQ ID NO: 17 - DNA, 1617 bp, Homo sapiens
ccacgcgtccgggctcgggagaggagtggacgccgctggccaggatggtgctggagagcgtggcccgtatcgtgaaggtgcagctccctgcatatctgaagcggctcccagtccctgaaagcattaccgggttcgctaggctcacagtttcagaatggcttcggttattgcctttccttggtgtactcgcacttcttggctaccttgcagttcgtccattcctcccgaagaagaaacaacagaaggatagcttgattaatcttaaaatacaaaaggaaaatccgaaagtagtgaatgaaataaacattgaagatttgtgtcttactaaagcagcttattgtaggtgttggcgttctaaaacgtttcctgcctgcgatggttcacataataaacacaatgaattgacaggagataatgtgggtccactaatactgaagaagaaagaagtataataataataacaatattttctcattctttgtgtatagaaaattttaaaatggtggtcttaattattactactggttgaacaattatttcttccaatttattttcttcctgcactactgtttgtatttgatcctttgtctattcagtcacttaattagaaattaaattgtcaagcctcttattctgacttcaaagaattaatgtatcttccaacaataaaatcacttctgattttaatctaggaaaacctaaattgtggctatggatccaaagctgtttgtttctttgaatatcaatattttcaacaggatcttgtatttaaaattcccacctacattgttaaatatgttattttttcatatctcttttggttttgataatctgaagtgtttttttctcgttttggccttccaaactgcatttggttaggtgaattaagaaaaatattgccatcaagaattacttgtgttttcacagagatagactctttgctttatagagattgttgtgtatttaatatgaatatcccagctttagaaaagaagtaaactggatacaaaaagttccattgaggaacagttatttacagtataaaagatttgtttactttacaaaaggcttgtgtctgtgtgtgtgtgtgtgtgtgtgtgtgtgtgtattttaaactgactcagtgacagctggggtggaatggcaagaacacttacaaccaaactcatgggctgctgcaatttgaagatcaattggtaataaacataagacattaattcatattaaaatagttcagtgttcaaaattgtgtttatgtggatatttttctctttttaacactataaaccattaaaatacagtcatcccttgtatacgctagggactggttccagggccacacatataccaaaatctgcccatactcaagtcccacagaaagtcttgcagaacccatatgtagaaaagttggccctccagttgaccctccgtacacatgagtttcacatcccatgcacaaatgctgatctgtgtgacctcacctgcatttgattgaaaaaagtatgcgcgtaagtgtacccacccagttcaaacccgtgtgtaagggtcaactgtacaaaaaagtttgtgaaataaacgtactggagaatctttaaaaaaaaaaaaaaaaaaaaaaaa

SEQ ID NO: 18 - DNA, 1286 bp, Homo sapiens
ctgactctctgaggctcattttgcagttgttgaaattgtccccgcagttttcaatcatgtctgaaccaatcagagtccttgtgactggagcagctggtcaaattgcatattcactgctgtacagtattggaaatggatctgtctttggtaaagatcagcctataattcttgtgctgttggatatcacccccatgatgggtgtcctggacggtgtcctaatggaactgcaagactgtgcccttcccctcctgaaagatgtcatcgcaacagataaagaagacgttgccttcaaagacctggatgtggccattcttgtgggctccatgccaagaagggaaggcatggagagaaaagatttactgaaagcaaatgtgaaaatcttcaaatcccagggtgcagccttagataaatacgccaagaagtcagttaaggttattgttgtgggtaatccagccaataccaactgcctgactgcttccaagtcagctccatccatccccaaggagaacttcagttgcttgactcgtttggatcacaaccgagctaaagctcaaattgctcttaaacttggtgtgactgctaatgatgtaaagaatgtcattatctggggaaaccattcctcgactcagtatccagatgtcaaccatgccaaggtgaaattgcaaggaaaggaagttggtgtttatgaagctctgaaagatgacagctggctcaagggagaatttgtcacgactgtgcagcagcgtggcgctgctgtcatcaaggctcgaaaactatccagtgccatgtctgctgcaaaagccatctgtgaccacgtcagggacatctggtttggaaccccagagggagagtttgtgtccatgggtgttatctctgatggcaactcctatggtgttcctgatgatctgctctactcattccctgttgtaatcaagaataagacctggaagtttgttgaaggtctccctattaatgatttctcacgtgagaagatggatcttactgcaaaggaactgacagaagaaaaagaaagtgcttttgaatttctttcctctgcctgactagacaatgatgttactaaatgcttcaaagctgaagaatctaaatgtcgtctttgactcaagtaccaaataataataatgctatacttaaattacttgtgaaaaacaacacattttaaagattacgtgcttcttggtacaggtttgtgaatgacagtttatcgtcatgctgttagtgtgcattctaaataaatatatattcaaatgaaaaaaaaaaaaaaaaaa

SEQ ID NO: 19 - DNA, 1244 bp, Homo sapiens
gccagtcggtgcccctcccgctccagccatgctctccgccctcgcccggcctgtcagcgctgctctccgccgcagcttcagcacctcggcccagaacaatgctaaagtagctgtgctaggggcctctggaggcatcgggcagccactttcacttctcctgaagaacagccccttggtgagccgcctgaccctctatgatatcgcgcacacacccggagtggccgcagatctgagccacatcgagaccaaagccgctgtgaaaggctacctcggacctgaacagctgcctgactgcctgaaaggttgtgatgtggtagttattccggctggagtccccagaaagccaggcatgacccgggacgacctgttcaacaccaatgccacgattgtggccaccctgaccgctgcctgtgcccagcactgcccggaagccatgatctgcgtcattgccaatccggttaattccaccatccccatcacagcagaagttttcaagaagcatggagtgtacaaccccaacaaaatcttcggcgtgacgaccctggacatcgtcagagccaacacctttgttgcagagctgaagggtttggatccagctcgagtcaacgtccctgtcattggtggccatgctgggaagaccatcatccccctgatctctcagtgcacccccaaggtggactttccccaggaccagctgacagcactcactgggcggatccaggaggccggcacggaggtggtcaaggctaaagccggagcaggctctgccaccctctccatggcgtatgccggcgcccgctttgtcttctcccttgtggatgcaatgaatggaaaggaaggtgttgtggaatgttccttcgttaagtcacaggaaacggaatgtacctacttctccacaccgctgctgcttgggaaaaagggcatcgagaagaacctgggcatcggcaaagtctcctcttttgaggagaagatgatctcggatgccatccccgagctgaaggcctccatcaagaagggggaagatttcgtgaagaccctgaagtgagccgctgtgacgggtggccagtttccttaatttatgaaggcatcatgtcactgcaaagccgttgcagataaactttgtattttaatttgctttggtgatgattactgtattgacatcatcatgccttccaaattgtgggtggctctgtgggcgcatcaataaaagccgtccttgattttaaaaaaaaaaaaaaaaaaaa

SEQ ID NO: 20 - DNA, 3443 bp, Homo sapiens
gccgtgcagtcggaggaacacgtggccatcagtaatcatgagcaacccattcgcacaccttgctgagccattggatcctgtacaaccaggaaagaaattcttcaatttgaataaattggaggattcaagatatgggcgcttaccattttcgatcagagttcttctggaagcagccattcggaattgtgatgagtttttggtgaagaaacaggatattgaaaatattctacattggaatgtcacgcagcacaagaacatagaagtgccatttaagcctgctcgtgtcatcctgcaggactttacgggtgtgcccgctgtggttgactttgctgcaatgcgtgatgctgtgaaaaagttaggaggagatccagagaaaataaaccctgtctgccctgctgatcttgtaatagatcattccatccaggttgatttcaacagaagggcagacagtttacagaagaatcaagacctggaatttgaaagaaatagagagcgatttgaatttttaaagtggggttcccaggcttttcacaacatgcggattattccccctggctcaggaatcatccaccaggtgaatttggaatatttggcaagagtggtatttgatcaggatggatattattacccagacagcctcgtgggcacagactcgcacactaccatgattgatggcttgggcattcttggttggggtgtcggtggtattgaagcagaagctgtcatgctgggtcagccaatcagtatggtgcttcctcaggtgattggctacaggctgatggggaagccccaccctctggtaacatccactgacatcgtgctcaccattaccaagcacctccgccaggttggggtagtgggcaaatttgtcgagttcttcgggcctggagtagcccagttgtccattgctgaccgagctacgattgctaacatgtgtccagagtacggagcaactgctgcctttttcccagttgatgaagttagtatcacgtacctggtgcaaacaggtcgtgatgaagaaaaattaaagtatattaaaaaatatcttcaggctgtaggaatgtttcgagatttcaatgacccttctcaagacccagacttcacccaggttgtggaattagatttgaaaacagtagtgccttgctgtagtggacccaaaaggcctcaggacaaagttgctgtgtccgacatgaaaaaggactttgagagctgccttggagccaagcaaggatttaaaggattccaagttgctcctgaacatcataatgaccataagacctttatctatgataacactgaattcacccttgctcatggttctgtggtcattgctgccattactagctgcacaaacaccagtaatccgtctgtgatgttaggggcaggattgttagcaaagaaagctgtggatgctggcctgaacgtgatgccttacatcaaaactagcctgtctcctgggagtggcgtggtcacctactacctacaagaaagcggagtcatgccttatctgtctcagcttgggtttgacgtggtgggctatggctgcatgacctgcattggcaacagtgggcctttacctgaacctgtggtagaagccatcacacagggagaccttgtagctgttggagtactatctggaaacaggaattttgaaggtcgagttcaccccaacacccgggccaactatttagcctctccccccttagtaatagcatatgcaattgctggaaccatcagaatcgactttgagaaagagccattgggagtaaatgcaaagggacagcaggtatttctgaaagatatctggccgactagagacgagatccaggcagtggagcgtcagtatgtcatcccggggatgtttaaggaagtctatcagaaaatagagactgtgaatgaaagctggaatgccttagcaaccccatcagataagctgtttttctggaattccaaatctacgtatatcaaatcaccaccattctttgaaaacctgactttggatcttcagccccctaaatctatagtggatgcctatgtgctgctaaatttgggagattcggtaacaactgaccacatctccccagctggaaatattgcaagaaacagtcctgctgctcgctacttaactaacagaggcctaactccacgagaattcaactcctatggctcccgccgaggtaatgacgccgtcatggcacggggaacatttgccaacattcgcttgttaaacagatttttgaacaagcaggcaccacagactatccatctgccttctggggaaatccttgatgtgtttgatgctgctgagcggtaccagcaggcaggccttcccctgatcgttctggctggcaaagagtacggtgcaggcagctcccgagactgggcagctaagggccctttcctgctgggaatcaaagccgtcctggccgagagctacgagcgcattcaccgcagtaacctggttgggatgggtgtgatcccacttgaatatctccctggtgagaatgcagatgccctggggctcacagggcaagaacgatacactatcattattccagaaaacctcaaaccacaaatgaaagtccaggtcaagctggatactggcaagaccttccaggctgtcatgaggtttgacactgatgtggagctcacttatttcctcaacgggggcatcctcaactacatgatccgcaagatggccaagtaggagacgtgcacttggtgctgcgcccagggaggaagccgcaccaccagccagcgcaggccctggtggagaggcctccctggctgcctctgggaggggtgctgccttgtagatggagcaagtgagcactgagggtctggtgccaatcctgtaggcacaaaaccagaagtttctacattctctatttttgttaatcatcttctctttttccagaatttggaagctagaatggtgggaatgtcagtagtgccagaaagagagaaccaagcttgtctttaaagttactgatcacaggacgttgctttttcactgtttcctattaatcttcagctgaacacaagcaaaccttctcaggaggtgtctcctaccctcttattgttcctcttacgctctgctcaatgaaaccttcctcttgagggtcattttcctttctgtattaattataccagtgttaagtgacatagataagaactttgcacacttcaaatcagagcagtgattctctcttctctccccttttccttcagagtgaatcatccagactcctcatggataggtcgggtgttaaagttgttttgattatgtaccttttgatagatccacataaaaagaaatgtgaagttttcttttactatcttttcatttatcaagcagagacctttgttgggaggcggtttgggagaacacatttctaatttgaatgaaatgaaatctattttcagtgaaaaaaaaaaaaaaa

SEQ ID NO: 21 - DNA, 2745 bp, Homo sapiens
gtcctcatctttgtcagtgcacaaaatggcgccctacagcctactggtgactcggctgcagaaagctctgggtgtgcggcagtaccatgtggcctcagtcctgtgccaacgggccaaggtggcgatgagccactttgagcccaacgagtacatccattatgacctgctagagaagaacattaacattgttcgcaaacgactgaaccggccgctgacactctcggagaagattgtgtatggacacctggatgaccccgccagccaggaaattgagcgaggcaagtcgtacctgcggctgcggccggaccgtgtggccatgcaggatgcgacggcccagatggccatgctccagttcatcagcagcgggctgtccaaggtggctgtgccatccaccatccactgtgaccatctgattgaagcccaggttgggggcgagaaagacctgcgccgggccaaggacatcaaccaggaagtttataatttcctggcaactgcaggtgccaaatatggcgtgggcttctggaagcctggatctggaatcattcaccagattattctggaaaactatgcgtaccctggtgttcttctgattggcactgactcccacacccccaatggtggcggccttgggggcatctgcattcgagttgggggtgccgatgctgtggatgtcatggctgggatcccctgggagttgaagtgccccaaggtgattggcgtgaagctgacgggctctctctccggttggtcctcacccaaagatgtgatcctgaaggtggcaggcatcctcacggtgaaaggtggcacaggtgcaatcgtggaataccacgggcatggtgtagactccatctcctgcactggcatggcgacaatctgcaacatgggtgcagaaattggggccaccacttccgtgttcccttacaaccacaggatgaagaagtacctgagcaagaccggccgggaagacattgccaatctagctgatgaattcaaggatcacttggtgcctgaccctggctgccattatgaccaactaattgaaattaacctcagtgagctgaagccacacatcaatgggcccttcacccctgacctggctcaccctgtggcagaagtgggcaaggtggcagagaaggaaggatggcctctggacatccgagtgggtctaattggtagctgcaccaattcaagctatgaagatatggggcgctcagcagctgtggccaagcaggcactggcccatggcctcaagtgcaagtcccagttcaccatcactccaggttccgagcagatccgcgccaccattgagcgggacggctatgcacagatcttgagggatctgggtggcattgtcctggccaatgcttgtggcccctgcattggccagtgggacaggaaggacatcaagaagggggagaagaacacaatcgtcacctcgtacaacaggaacttcacgggccgcaacgacgcaaaccccgagacccatgcctttgtcacgtccccagagattgtcacagccctggccattgcgggaaccctcaagttcaacccagagaccgactacctgacgggcacggatggcaagaagttcaggctggaggctccggatgcagatgagcttcccaaaggggagtttgacccagggcaggacacctaccagcacccacccaaggacagcagcgggcagcatgtggacgtgagccccaccagccagcgcctgcagctcctggagccttttgacaagtgggatggcaaggacctggaggacctgcagatcctcatcaaggtcaaagggaagtgtaccactgaccacatctcagctgctggcccctggctcaagttccgtgggcacttggataacatctccaacaacctgctcattggtgccatcaacattgaaaacggcaaggccaactccgtgcgcaatgccgtcactcaggagtttggccccgtccctgacactgcccgctactacaagaaacatggcatcaggtgggtggtgatcggagacgagaactacggcgagggctcgagccgggagcatgcagctctggagcctcgccaccttgggggccgggccatcatcaccaagagctttgccaggatccacgagaccaacctgaagaaacagggcctgctgcctctgaccttcgctgacccggctgactacaacaagattcaccctgtggacaagctgaccattcagggcctgaaggacttcacccctggcaagcccctgaagtgcatcatcaagcaccccaacgggacccaggagaccatcctcctgaaccacaccttcaacgagacgcagattgagtggttccgcgctggcagtgccctcaacagaatgaaggaactgcaacagtgagggcagtgcctccccgccccgccgctggcgtcaagttcagctccacgtgtgccatcagtggatccgatccgtccagccatggcttcctattccaagatggtgtgaccagacatgcttcctgctccccgcttagcccacggagtgactgtggttgtggtgggggggttcttaaaataactttttagcccccatcttcctattttgagtttggttcagatcttaagcagctccatgcaactgtatttatttttgatgacaagactcccatctaaagtttttctcctgcctgatcatttcattggtggctgaaggattctagagaaccttttgttcttgcaaggaaaacaagaatccaaaaccaaaaaaaaaaaaaaaaa

SEQ ID NO: 22 - DNA, 2326 bp, Homo sapiens
ggcggcgaagcgggggcacgccctcgcacacgcagagataaattgtgctcccatgacctttatttggaaagtgcctgcgggcctaaaattggcctttgtcccaccgagtacactcagcactgtactttaaaccggataaactgggctgtctggcaggcgataaactacattcagttgagtctgcaagactgggaggaactggggtgataagaaatctattcactgtcaaggtttattgaagtcaaaatgtccaaaaaaatcagtggcggttctgtggtagagatgcaaggagatgaaatgacacgaatcatttgggaattgattaaagagaaactcatttttccctacgtggaattggatctacatagctatgatttaggcatagagaatcgtgatgccaccaacgaccaagtcaccaaggatgctgcagaagctataaagaagcataatgttggcgtcaaatgtgccactatcactcctgatgagaagagggttgaggagttcaagttgaaacaaatgtggaaatcaccaaatggcaccatacgaaatattctgggtggcacggtcttcagagaagccattatctgcaaaaatatcccccggcttgtgagtggatgggtaaaacctatcatcataggtcgtcatgcttatggggatcaatacagagcaactgattttgttgttcctgggcctggaaaagtagagataacctacacaccaagtgacggaacccaaaaggtgacatacctggtacataactttgaagaaggtggtggtgttgccatggggatgtataatcaagataagtcaattgaagattttgcacacagttccttccaaatggctctgtctaagggttggcctttgtatctgagcaccaaaaacactattctgaagaaatatgatgggcgttttaaagacatctttcaggagatatatgacaagcagtacaagtcccagtttgaagctcaaaagatctggtatgagcataggctcatcgacgacatggtggcccaagctatgaaatcagagggaggcttcatctgggcctgtaaaaactatgatggtgacgtgcagtcggactctgtggcccaagggtatggctctctcggcatgatgaccagcgtgctggtttgtccagatggcaagacagtagaagcagaggctgcccacgggactgtaacccgtcactaccgcatgtaccagaaaggacaggagacgtccaccaatcccattgcttccatttttgcctggaccagagggttagcccacagagcaaagcttgataacaataaagagcttgccttctttgcaaatgctttggaagaagtctctattgagacaattgaggctggcttcatgaccaaggacttggctgcttgcattaaaggtttacccaatgtgcaacgttctgactacttgaatacatttgagttcatggataaacttggagaaaacttgaagatcaaactagctcaggccaaactttaagttcatacctgagctaagaaggataattgtcttttggtaactaggtctacaggtttacatttttctgtgttacactcaaggataaaggcaaaatcaattttgtaatttgtttagaagccagagtttatcttttctataagtttacagcctttttcttatatatacagttattgccacctttgtgaacatggcaagggacttttttacaatttttattttattttctagtaccagcctaggaattcggttagtactcatttgtattcactgtcactttttctcatgttctaattataaatgaccaaaatcaagattgctcaaaagggtaaatgatagccacagtattgctccctaaaatatgcataaagtagaaattcactgccttcccctcctgtccatgaccttgggcacagggaagttctggtgtcatagatatcccgttttgtgaggtagagctgtgcattaaacttgcacatgactggaacgaagtatgagtgcaactcaaatgtgttgaagatactgcagtcatttttgtaaagaccttgctgaatgtttccaatagactaaatactgtttaggccgcaggagagtttggaatccggaataaatactacctggaggtttgtcctctccatttttctctttctcctcctggcctggcctgaatattatactactctaaatagcatatttcatccaagtgcaataatgtaagctgaatcttttttggacttctgctggcctgttttatttcttttatataaatgtgatttctcagaaattgatattaaacactatcttatcttctcctgaaaaaaaaaaaaaaaaaaaaaaa

SEQ ID NO: 23 - DNA, 1727 bp, Homo sapiens
ggcagccgggaggagcggcgcgcgctcggacctctcccgccctgctcgttcgctctccagcttgggatggccggctacctgcgggtcgtgcgctcgctctgcagagcctcaggctcgcggccggcctgggcgccggcggccctgacagcccccacctcgcaagagcagccgcggcgccactatgccgacaaaaggatcaaggtggcgaagcccgtggtggagatggatggtgatgagatgacccgtattatctggcagttcatcaaggagaagctcatcctgccccacgtggacatccagctaaagtattttgacctcgggctcccaaaccgtgaccagactgatgaccaggtcaccattgactctgcactggccacccagaagtacagtgtggctgtcaagtgtgccaccatcacccctgatgaggcccgtgtggaagagttcaagctgaagaagatgtggaaaagtcccaatggaactatccggaacatcctgggggggactgtcttccgggagcccatcatctgcaaaaacatcccacgcctagtccctggctggaccaagcccatcaccattggcaggcacgcccatggcgaccagtacaaggccacagactttgtggcagaccgggccggcactttcaaaatggtcttcaccccaaaagatggcagtggtgtcaaggagtgggaagtgtacaacttccccgcaggcggcgtgggcatgggcatgtacaacaccgacgagtccatctcaggttttgcgcacagctgcttccagtatgccatccagaagaaatggccgctgtacatgagcaccaagaacaccatactgaaagcctacgatgggcgtttcaaggacatcttccaggagatctttgacaagcactataagaccgacttcgacaagaataagatctggtatgagcaccggctcattgatgacatggtggctcaggtcctcaagtcttcgggtggctttgtgtgggcctgcaagaactatgacggagatgtgcagtcagacatcctggcccagggctttggctcccttggcctgatgacgtccgtcctggtctgccctgatgggaagacgattgaggctgaggccgctcatgggaccgtcacccgccactatcgggagcaccagaagggccggcccaccagcaccaaccccatcgccagcatctttgcctggacacgtggcctggagcaccgggggaagctggatgggaaccaagacctcatcaggtttgcccagatgctggagaaggtgtgcgtggagacggtggagagtggagccatgaccaaggacctggcgggctgcattcacggcctcagcaatgtgaagctgaacgagcacttcctgaacaccacggacttcctcgacaccatcaagagcaacctggacagagccctgggcaggcagtagggggaggcgccacccatggctgcagtggaggggccagggctgagccggcgggtcctcctgagcgcggcagagggtgagcctcacagcccctctctggaggcctttctaggggatgtttttttataagccagatgtttttaaaagcatatgtgtgtttcccctcatggtgacgtgaggcaggagcagtgcgttttacctcagccagtcagtatgttttgcatactgtaatttatattgcccttggaacacatggtgccatatttagctactaaaaagctcttcacaaaaaaaaaaaaaaaaaa

SEQ ID NO: 24 - DNA, 1803 bp, Homo sapiens
cggagccaggaggggaagcgatggctgggcccgcgtggatctctaaggtctctcggctgctgggggcattccacaacccaaaacaggtgaccagaggttttactggtggtgttcagacagtaactttaattccaggagatggtattggcccagaaatttcagctgcagttatgaagatttttgatgctgccaaagcacctattcagtgggaggagcggaacgtcactgccattcaaggacctggaggaaagtggatgatcccttcagaggctaaagagtccatggataagaacaagatgggcttgaaaggccctttgaagaccccaatagcagccggtcacccatctatgaatttactgctgcgcaaaacatttgacctttacgcgaatgtccgaccatgtgtctctatcgaaggctataaaaccccttacaccgatgtaaatattgtgaccattcgagagaacacagaaggagaatacagtggaattgagcatgtgattgttgatggagtcgtgcagagtatcaagctcatcaccgagggggcgagcaagcgcattgctgagtttgcctttgagtatgcccggaacaaccaccggagcaacgtcacggcggtgcacaaagccaacatcatgcggatgtcagatgggctttttctacaaaaatgcagggaagttgcagaaagctgtaaagatattaaatttaatgagatgtaccttgatacagtatgtttgaatatggtacaagatccttcccaatttgatgttcttgttatgccaaatttgtatggagacatccttagtgacttgtgtgcaggattgatcggaggtctcggtgtgacaccaagtggcaacattggagccaatggggttgcaatttttgagtcggttcatgggacggctccagacattgcaggcaaggacatggcgaatcccacagccctcctgctcagtgccgtgatgatgctgcgccacatgggactttttgaccatgctgcaagaattgaggctgcgtgttttgctacaattaaggacggaaagagcttgacaaaagatttgggaggcaatgcaaaatgctcagacttcacagaggaaatctgtcgccgagtaaaagatttagattaacacttctacaactggcatttacatcagtcactctaaatggacaccacatgaacctctgtttagaatacctacgtatgtatgcattggtttgcttgtttcttgacagtacatttttagatctggccttttcttaacaaaatctgtgcaaaagatgcaggtggatgtccctaggtctgttttcaaagaactttttccaagtgcttgttttatttattaagtgtctacctggtaaatgttttttttgtaaactctgagtggactgtatcatttgctattctaaaccattttacacttaagttaaaatagtttctcttcagctgtaaataacaggatacagaattaacaagagaaaatgtctaactttttaagaaaaaccttattttcttcggtttttgaaaaacataatggaaataaaacaggatattgacataatagcacaaaatgacactcttctaaaactaaatgggcacaagagaattttcctgggaaagttcacatcaaaaagagtgaatgtggtatatttctaaatgatatggaaaatagagacagatttgtcctttacagaaattactgagtgtgaataaaaacttcagatccaagaaatatataatgagagatataatttttgttaataagacaaaggtaatatattggatacaaagacaaaaaaaaaaaaaaaaaa

SEQ ID NO: 25 - DNA, 1770 bp, Homo sapiens
cacggagatctcgccggctttacgttcacctcggtgtctgcagcaccctccgcttcctctcctaggcgacgagacccagtggctagaagttcaccatgtctattctcaagatccatgccagggagatctttgactctcgcgggaatcccactgttgaggttgatctcttcacctcaaaaggtctcttcagagctgctgtgcccagtggtgcttcaactggtatctatgaggccctagagctccgggacaatgataagactcgctatatggggaagggtgtctcaaaggctgttgagcacatcaataaaactattgcgcctgccctggttagcaagaaactgaacgtcacagaacaagagaagattgacaaactgatgatcgagatggatggaacagaaaataaatctaagtttggtgcgaacgccattctgggggtgtcccttgccgtctgcaaagctggtgccgttgagaagggggtccccctgtaccgccacatcgctgacttggctggcaactctgaagtcatcctgccagtcccggcgttcaatgtcatcaatggcggttctcatgctggcaacaagctggccatgcaggagttcatgatcctcccagtcggtgcagcaaacttcagggaagccatgcgcattggagcagaggtttaccacaacctgaagaatgtcatcaaggagaaatatgggaaagatgccaccaatgtgggggatgaaggcgggtttgctcccaacatcctggagaataaagaaggcctggagctgctgaagactgctattgggaaagctggctacactgataaggtggtcatcggcatggacgtagcggcctccgagttcttcaggtctgggaagtatgacctggacttcaagtctcccgatgaccccagcaggtacatctcgcctgaccagctggctgacctgtacaagtccttcatcaaggactacccagtggtgtctatcgaagatccctttgaccaggatgactggggagcttggcagaagttcacagccagtgcaggaatccaggtagtgggggatgatctcacagtgaccaacccaaagaggatcgccaaggccgtgaacgagaagtcctgcaactgcctcctgctcaaagtcaaccagattggctccgtgaccgagtctcttcaggcgtgcaagctggcccaggccaatggttggggcgtcatggtgtctcatcgttcgggggagactgaagataccttcatcgctgacctggttgtggggctgtgcactgggcagatcaagactggtgccccttgccgatctgagcgcttggccaagtacaaccagctcctcagaattgaagaggagctgggcagcaaggctaagtttgccggcaggaacttcagaaaccccttggccaagtaagctgtgggcaggcaagcccttcggtcacctgttggctacacagacccctcccctcgtgtcagctcaggcagctcgaggcccccgaccaacacttgcaggggtccctgctagttagcgccccaccgccgtggagttcgtaccgcttccttagaacttctacagaagccaagctccctggagccctgttggcagctctagctttgcagtcgtgtaattggcccaagtcattgtttttctcgcctcactttccaccaagtgtctagagtcatgtgagcctcgtgtcatctccggggtggccacaggctagatccccggtggttttgtgctcaaaataaaaagcctctgtgacccatgaaaaaaaaaaaaaaaa

SEQ ID NO: 26 - DNA, 1566 bp, Homo sapiens
gaaatctcttgattcctagtctctcgatatggcacctccgtcagtctttgccgaggttccgcaggcccagcctgtcctggtcttcaagctcactgccgacttcagggaggatccggacccccgcaaggtcaacctgggagtgggagcatatcgcacggatgactgccatccctgggttttgccagtagtgaagaaagtggagcagaagattgctaatgacaatagcctaaatcacgagtatctgccaatcctgggcctggctgagttccggagctgtgcttctcgtcttgcccttggggatgacagcccagcactcaaggagaagcgggtaggaggtgtgcaatctttggggggaacaggtgcacttcgaattggagctgatttcttagcgcgttggtacaatggaacaaacaacaagaacacacctgtctatgtgtcctcaccaacctgggagaatcacaatgctgtgttttccgctgctggttttaaagacattcggtcctatcgctactgggatgcagagaagagaggattggacctccagggcttcctgaatgatctggagaatgctcctgagttctccattgttgtcctccacgcctgtgcacacaacccaactgggattgacccaactccggagcagtggaagcagattgcttctgtcatgaagcaccggtttctgttccccttctttgactcagcctatcagggcttcgcatctggaaacctggagagagatgcctgggccattcgctattttgtgtctgaaggcttcgagttcttctgtgcccagtccttctccaagaacttcgggctctacaatgagagagtcgggaatctgactgtggttggaaaagaacctgagagcatcctgcaagtcctttcccagatggagaagatcgtgcggattacttggtccaatccccccgcccagggagcacgaattgtggccagcaccctctctaaccctgagctctttgaggaatggacaggtaatgtgaagacaatggctgaccggattctgaccatgagatctgaactcagggcacgactagaagccctcaaaacccctgggacctggaaccacatcactgatcaaattggcatgttcagcttcactgggttgaaccccaagcaggttgagtatctggtcaatgaaaagcacatctacctgctgccaagtggtcgaatcaacgtgagtggcttaaccaccaaaaatctagattacgtggccacctccatccatgaagcagtcaccaaaatccagtgaagaaacaccacccgtccagtaccaccaaagtagttctctgtcatgtgtgttccctgcctgcacaaacctacatgtacataccatggattagagacacttgcaggactgaaaggctgctctggtgaggcagcctctgtttaaaccggccccacatgaagagaacatcccttgagacgaatttggagactgggattagagcctttggaggtcaaagcaaattaagatttttatttaagaataaaagagtactttgatcatgagaaaaaaaacaaaaaaaaaaaaaaaaaaaaaaaaaa

SEQ ID NO: 27 - DNA, 2411 bp, Homo sapiens
gctcgccctctgctccgtcctgcggctgcccactgccctcctacggtccaccatggccctgctgcactccggccgcgtcctccccgggatcgccgccgccttccacccgggcctcgccgccgcggcctctgccagagccagctcctggtggacccatgtggaaatgggacctccagatcccattctgggagtcactgaagcctttaagagggacaccaatagcaaaaagatgaatctgggagttggtgcctaccgggatgataatggaaagccttacgttctgcctagcgtccgcaaggcagaggcccagattgccgcaaaaaatttggacaaggaatacctgcccattgggggactggctgaattttgcaaggcatctgcagaactagccctgggtgagaacagcgaagtcttgaagagtggccggtttgtcactgtgcagaccatttctggaactggagccttaaggatcggagccagttttctgcaaagattttttaagttcagccgagatgtctttctgcccaaaccaacctggggaaaccacacacccatcttcagggatgctggcatgcagctacaaggttatcggtattatgaccccaagacttgcggttttgacttcacaggcgctgtggaggatatttcaaaaataccagagcagagtgttcttcttctgcatgcctgcgcccacaatcccacgggagtggacccgcgtccggaacagtggaaggaaatagcaacagtggtgaagaaaaggaatctctttgcgttctttgacatggcctaccaaggctttgccagtggtgatggtgataaggatgcctgggctgtgcgccacttcatcgaacagggcattaatgtttgcctctgccaatcatatgccaagaacatgggcttatatggtgagcgtgtaggagccttcactatggtctgcaaagatgcggatgaagccaaaagggtagagtcacagttgaagatcttgatccgtcccatgtattccaaccctcccctcaatggggcccggattgctgctgccattctgaacaccccagatttgcgaaaacaatggctgcaagaagtgaaagtcatggctgaccgcatcattggcatgcggactcaactggtctccaacctcaagaaggagggttccacccacaattggcaacacatcaccgaccaaattggcatgttctgtttcacagggctaaagcctgaacaggtggagcggctgatcaaggagttctccatctacatgacaaaagatggccgcatctctgtggcaggggtcacctccagcaacgtgggctaccttgcccatgccattcaccaggccaccaagtaatgtccctggtgcgaggaaacagagacaacctttctgtcttcagcctctgctattgagagcttcacacagacaatgagagagggtggatggtggtgagtggatcatttctttcagccacagtgtgtaacactcagcatttgaatgtttctcagaaaagaacatgtagtgacacagggcagaggcatccatggctggcgtctggaatattaaaccaaactctccccggtccttttttctccaacttttctcaaagagtttacatgtgcaagaaagtcatcgcaccaaaaaacctgtcaattatgccattgcaatatttcagaagctttaactgaagtgtcaggttcctcgtgagaaacagcacacgttagaggctttgagagaaggcctagttctgtcatgagtagtcggcctcgtgtctgtcctcccatcttggaacaaccttatcaacaggccgcactgcagaaatgatgttttatgaaaaccaatgaggctgctgccactccagcaagggaaataatgcagtttcctgtcttatttaagaaaaagagaaggctctcttttctcccttgtcattgccgttcttttccttacacgcaaagattttttaactattgcagattttcatcccattctactgcttgattgaccatcaactccatcctatcgagatttatttaagaatgaagaacataattttctgctgatgctgtaccctcacccttttcagcaaagaatagtggagagtaggaaactgtactttatctcggcatcctcttgaatgatagtgcaagtttctccagttgggatgttgtctctgcccggttggacctcctccctttgttgaatgtggtgtgcagcctctcatctcacactgtgagtccagcggcgcagggtggtaccaggaaagaggatattctaggctttgcgtgctgctagctgggttcaggcttcacccactggaaagaaccaccatctgctctaaccatgtagacttattgcggcctggtttctctgttacaataaaattactgtagacccaaaaaaaaaaaaaaaaaaaaaaaaaaaa

SEQ ID NO: 28 - DNA, 1003 bp, Homo sapiens
cgcctgcctgaatctgttctgccccctccccacccatttcaccaccaccatgacaccgggcacccagtctcctttcttcctgctgctgctcctcacagtgcttacagctaccacagcccctaaacccgcaacagttgttacgggttctggtcatgcaagctctaccccaggtggagaaaaggagacttcggctacccagagaagttcagtgcccagctctactgagaagaatgcttttaattcctctctggaagatcccagcaccgactactaccaagagctgcagagagacatttctgaaatgtttttgcagatttataaacaagggggttttctgggcctctccaatattaagttcaggccaggatctgtggtggtacaattgactctggccttccgagaaggtaccatcaatgtccacgacgtggagacacagttcaatcagtataaaacggaagcagcctctcgatataacctgacgatctcagacgtcagcgtgagtgatgtgccatttcctttctctgcccagtctggggctggggtgccaggctggggcatcgcgctgctggtgctggtctgtgttctggttgcgctggccattgtctatctcattgccttggctgtctgtcagtgccgccgaaagaactacgggcagctggacatctttccagcccgggatacctaccatcctatgagcgagtaccccacctaccacacccatgggcgctatgtgccccctagcagtaccgatcgtagcccctatgagaaggtttctgcaggtaatggtggcagcagcctctcttacacaaacccagcagtggcagccacttctgccaacttgtaggggcacgtcgcccgctgagctgagtggccagccagtgccattccactccactcaggttcttcagggccagagcccctgcaccctgtttgggctggtgagctgggagttcaggtgggctgctcacagcctccttcagaggccccaccaatttctcggaca

SEQ ID NO: 29 - DNA, 2978 bp, Homo sapiens
ggcggcgtttccagttgagagatggcggccgccgcaggtagatcgctcctgctgctcctctcctctcggggcggcggcggcgggggcgccggcggctgcggggcgctgactgccggctgcttccctgggctgggcgtcagccgccaccggcagcagcagcaccaccggacggtacaccagaggatcgcttcctggcagaatttgggagctgtttattgcagcactgttgtgccctctgatgatgttacagtggtttatcaaaatgggttacctgtgatatctgtgaggctaccatcccggcgtgaacgctgtcagttcacactcaagcctatctctgactctgttggtgtatttttacgacaactgcaagaagaggatcggggaattgacagagttgctatctattcaccagatggtgttcgcgttgctgcttcaacaggaatagacctcctcctccttgatgactttaagctggtcattaatgacttaacataccacgtacgaccaccaaaaagagacctcttaagtcatgaaaatgcagcaacgctgaatgatgtaaagacattggtccagcaactatacaccacactgtgcattgagcagcaccagttaaacaaggaaagggagcttattgaaagactagaggatctcaaagagcagctggctcccctggaaaaggtacgaattgagattagcagaaaagctgagaagaggaccactttggtgctatggggtggccttgcctacatggccacacagtttggcattttggcccggcttacctggtgggaatattcctgggacatcatggagccagtaacatacttcatcacttatggaagtgccatggcaatgtatgcatattttgtaatgacacgccaggaatatgtttatccagaagccagagacagacaatacttactatttttccataaaggagccaaaaagtcacgttttgacctagagaaatacaatcaactcaaggatgcaattgctcaggcagaaatggaccttaagagactgagagacccattacaagtacatctgcctctccgacaaattggtgaaaaagattgatctgcaaaaagcctctgaatcctggcagaaggaacacctgtttgcctttttaattaaagcattgcaggtggaagctgggagccatgtggggggtagagcgtttttacctttaattataaaacaaaaacagaaaggatctgagggaagaagggaatgttaaaacctgaggatcaggcattgtggaatataagctcaaagggcttagtgaatattgtcttaaccaagtatctcagtttctggatgaaaatgatgcagttatatagttgagagattcataaagagaaaacaatgctgggggtgttcgtttcttgcatcttctttgcagagtcagcaaaagagtaacacaccagcaccccactcgactctatttgtttttaatttaactgtccctatttttgacataggagtaaataaatatactagaaaagcaaattctcatgatatgctaaaatatcattagcatttattttaaattggacccagtctctgcagagttaccaggaatctttccttccagcatccctttactgtccacctacctgtacctcttggttacactcattttttccatttgataattggaaccaacttataactgtttaataattgacactttagattatctcttaataccttcttaaatgtctatatatcccagtgctctggatcagtgtctaaaaatcactggcaacactgcatgaggttgttggttttgttttgttttattaattagtctttcacaggaggaataattgccctcctttatatacttatctattgataatcccctctccctccagaacacaaatcagagggaaagggggtgttcagctgtactaccaaatcaggaagatgtaaggtttacaaattggctaagaatcatggctctgtagccatttcaaccagaataattttattgctaatctgctttgtgtgacagcattccaggccagccagatgggactgccttgtctggaggctttgttcatctcgaaggacacacacttccacactgtttgtgagccctcccacctccacaacttcagttgtaaatcaagtgtgtggatctcaaagggtgcaatttatctttatataggaatacatttctagggcttccttcaagcccactctcttcaccctattttttcttatcttaaattgagagaaagagaattaatcttatactttgtcaaaacattttctaccatatttccagatgacatctgcgcttgaagagtcaaaggaatctgtgtctaatatcctgtttttaactgctgtaggggcaggatggaaaggatgatgggggctgccacaccactgattggccttttctttcacgtgattcatccttcctcattgtggcaaggagtttctttctctttttcttcctcctttgggatcattgtgtatgaaaagaaaaactttaaatgacaaacccagactccaggtgccttgcaaaggttgaaggccagccaggattgctgctgctgctgctactcctgccaacacccctttcattggcatgacggaatgaaaggatgcatgtctccacttcctgaccctccgcccacttccttctccctccaccacccccagtcgtcagctccttccctcatttatttttgttaagttgtgtgaattatttttaacccatttatcctgtttgtgcatagggtttttaagaagaaacagcacagtgcaacgagcaaatctttttggggtgtgtgggaagcaagggagggaggacatggagaaaagttctttaaacaaatagcaaactattgaacatgtgtaaaatcctgtatcatttatgaaatatgtataaaaagcaatgtaccttctggaacaataaatacttattcaatttttgaaaaaaaaaaaaaaaaaaaaaaaaaaaaaaa

SEQ ID NO: 30 - DNA, 130 bp, Artificial Sequence
  Description of Artificial Sequence: Synthetic polynucleotide
cctgcaggcagctgcgcgctcgctcgctcactgaggccgcccgggcgtcgggcgacctttggtcgcccggcctcagtgagcgagcgagcgcgcagagagggagtggccaactccatcactaggggttcct

SEQ ID NO: 31 - DNA, 141 bp, Artificial Sequence
  Description of Artificial Sequence: Synthetic polynucleotide
cctgcaggcagctgcgcgctcgctcgctcactgaggccgcccgggcaaagcccgggcgtcgggcgacctttggtcgcccggcctcagtgagcgagcgagcgcgcagagagggagtggccaactccatcactaggggttcct

SEQ ID NO: 32 - DNA, 3902 bp, Artificial Sequence
  Description of Artificial Sequence: Synthetic polynucleotide
ctagcaatcaacctctggattacaaaatttgtgaaagattgactggtattcttaactatgttgctccttttacgctatgtggatacgctgctttaatgcctttgtatcatgctattgcttcccgtatggctttcattttctcctccttgtataaatcctggttagttcttgccacggcggaactcatcgccgcctgccttgcccgctgctggacaggggctcggctgttgggcactgacaattccgtggtgtttatttgtgaaatttgtgatgctattgctttatttgtaaccattctagctttatttgtgaaatttgtgatgctattgctttatttgtaaccattataagctgcaataaacaagttaacaacaacaattgcattcattttatgtttcaggttcagggggagatgtgggaggttttttaaagcgggggatccaaattcccgataaggatcttcctagagcatggctacgtagataagtagcatggcgggttaatcattaactacaaggaacccctagtgatggagttggccactccctctctgcgcgctcgctcgctcactgaggccgggcgaccaaaggtcgcccgacgcccgggctttgcccgggcggcctcagtgagcgagcgagcgcgcagccttaattaacctaattcactggccgtcgttttacaacgtcgtgactgggaaaaccctggcgttacccaacttaatcgccttgcagcacatccccctttcgccagctggcgtaatagcgaagaggcccgcaccgatcgcccttcccaacagttgcgcagcctgaatggcgaatgggacgcgccctgtagcggcgcattaagcgcggcgggtgtggtggttacgcgcagcgtgaccgctacacttgccagcgccctagcgcccgctcctttcgctttcttcccttcctttctcgccacgttcgccggctttccccgtcaagctctaaatcgggggctccctttagggttccgatttagtgctttacggcacctcgaccccaaaaaacttgattagggtgatggttcacgtagtgggccatcgccctgatagacggtttttcgccctttgacgttggagtccacgttctttaatagtggactcttgttccaaactggaacaacactcaaccctatctcggtctattcttttgatttataagggattttgccgatttcggcctattggttaaaaaatgagctgatttaacaaaaatttaacgcgaattttaacaaaatattaacgtttataatttcaggtggcatctttcggggaaatgtgcgcggaacccctatttgtttatttttctaaatacattcaaatatgtatccgctcatgagacaataaccctgataaatgcttcaataatattgaaaaaggaagagtatgagtattcaacatttccgtgtcgcccttattcccttttttgcggcattttgccttcctgtttttgctcacccagaaacgctggtgaaagtaaaagatgctgaagatcagttgggtgcacgagtgggttacatcgaactggatctcaatagtggtaagatccttgagagttttcgccccgaagaacgttttccaatgatgagcacttttaaagttctgctatgtggcgcggtattatcccgtattgacgccgggcaagagcaactcggtcgccgcatacactattctcagaatgacttggttgagtactcaccagtcacagaaaagcatcttacggatggcatgacagtaagagaattatgcagtgctgccataaccatgagtgataacactgcggccaacttacttctgacaacgatcggaggaccgaaggagctaaccgcttttttgcacaacatgggggatcatgtaactcgccttgatcgttgggaaccggagctgaatgaagccataccaaacgacgagcgtgacaccacgatgcctgtagtaatggtaacaacgttgcgcaaactattaactggcgaactacttactctagcttcccggcaacaattaatagactggatggaggcggataaagttgcaggaccacttctgcgctcggcccttccggctggctggtttattgctgataaatctggagccggtgagcgtgggtctcgcggtatcattgcagcactggggccagatggtaagccctcccgtatcgtagttatctacacgacggggagtcaggcaactatggatgaacgaaatagacagatcgctgagataggtgcctcactgattaagcattggtaactgtcagaccaagtttactcatatatactttagattgatttaaaacttcatttttaatttaaaaggatctaggtgaagatcctttttgataatctcatgaccaaaatcccttaacgtgagttttcgttccactgagcgtcagaccccgtagaaaagatcaaaggatcttcttgagatcctttttttctgcgcgtaatctgctgcttgcaaacaaaaaaaccaccgctaccagcggtggtttgtttgccggatcaagagctaccaactctttttccgaaggtaactggcttcagcagagcgcagataccaaatactgtccttctagtgtagccgtagttaggccaccacttcaagaactctgtagcaccgcctacatacctcgctctgctaatcctgttaccagtggctgctgccagtggcgataagtcgtgtcttaccgggttggactcaagacgatagttaccggataaggcgcagcggtcgggctgaacggggggttcgtgcacacagcccagcttggagcgaacgacctacaccgaactgagatacctacagcgtgagctatgagaaagcgccacgcttcccgaagggagaaaggcggacaggtatccggtaagcggcagggtcggaacaggagagcgcacgagggagcttccagggggaaacgcctggtatctttatagtcctgtcgggtttcgccacctctgacttgagcgtcgatttttgtgatgctcgtcaggggggcggagcctatggaaaaacgccagcaacgcggcctttttacggttcctggccttttgctggccttttgctcacatgttctttcctgcgttatcccctgattctgtggataaccgtattaccgcctttgagtgagctgataccgctcgccgcagccgaacgaccgagcgcagcgagtcagtgagcgaggaagcggaagagcgcccaatacgcaaaccgcctctccccgcgcgttggccgattcattaatgcagctggcacgacaggtttcccgactggaaagcgggcagtgagcgcaacgcaattaatgtgagttagctcactcattaggcaccccaggctttacactttatgcttccggctcgtatgttgtgtggaattgtgagcggataacaatttcacacaggaaacagctatgaccatgattacgccagatttaattaaggccttaattaggctgcgcgctcgctcgctcactgaggccgcccgggcaaagcccgggcgtcgggcgacctttggtcgcccggcctcagtgagcgagcgagcgcgcagagagggagtggccaactccatcactaggggttccttgtagttaatgattaacccgccatgctacttatctacgtagccatgctctaggaagatcggaattcctaggctccggtgcccgtcagtgggcagagcgcacatcgcccacagtccccgagaagttggggggaggggtcggcaattgaaccggtgcctagagaaggtggcgcggggtaaactgggaaagtgatgtcgtgtactggctccgcctttttcccgagggtgggggagaaccgtatataagtgcagtagtcgccgtgaacgttctttttcgcaacgggtttgccgccagaacacagcggcc

SEQ ID NO: 33 - DNA, 47 bp, Artificial Sequence
  Description of Artificial Sequence: Synthetic primer
atgttagcggccgcgccaccatgatgagctttgtgcaaaaggggagc

SEQ ID NO: 34 - DNA, 45 bp, Artificial Sequence
  Description of Artificial Sequence: Synthetic primer
cttacggctagcttattataaaaagcaaacagggccaacgtccac

SEQ ID NO: 35 - DNA, 1257 bp, Homo sapiens
gttcgttgcaacaaattgatgagcaatgcttttttataatgccaactttgtacaaaaaagttggcatggatgatgatatcgccgcgctcgtcgtcgacaacggctccggcatgtgcaaggccggcttcgcgggcgacgatgccccccgggccgtcttcccctccatcgtggggcgccccaggcaccagggcgtgatggtgggcatgggtcagaaggattcctatgtgggcgacgaggcccagagcaagagaggcatcctcaccctgaagtaccccatcgagcacggcatcgtcaccaactgggacgacatggagaaaatctggcaccacaccttctacaatgagctgcgtgtgcctcccgaggagcaccccgtgctgctgaccgaggcccccctgaaccccaaggccaaccgcgagaagatgacccagatcatgtttgagaccttcaacaccccagccatgtacgttgctatccaggctgtgctatccctgtacgcctctggccgtaccactggcatcgtgatggactccggtgacggggtcacccacactgtgcccatctacgaggggtatgccctcccccatgccatcctgcgtctggacctggctggccgggacctgactgactacctcatgaagatcctcaccgagcgcggctacagcttcaccaccacggccgagcgggaaatcgtgcgtgacattaaggagaagctgtgctacgtcgccctggacttcgagcaagagatggccacggctgcttccagctcctccctggagaagagctacgagctgcctgacggccaggtcatcaccattggcaatgagcggttccgctgccctgaggcactcttccagccttccttcctgggcatggagtcctgtggcatccacgaaactaccttcaactccatcatgaagtgtgacgtggacatccgcaaagacctgtacgccaacacagtgctgtctggcggcaccaccatgtaccctggcattgccgacaggatgcagaaggagatcactgccctggcacccagcacaatgaagatcaagatcattgctcctcctgagcgcaagtactccgtgtggatcggcggctccatcctggcctcgctgtccaccttccagcagatgtggatcagcaagcaggagtatgacaagtccggcccctccatcgtccaccgcaaatgcttctacccaactttcttgtacaaagttggcattataagaaagcattgcttatcaatttgttgcaacgaac

SEQ ID NO: 36 - DNA, 3740 bp, Homo sapiens
gggacggcggcggcgcagctcggaacccgccagggtccagggtccaggttccagcgcccggcggcccaggcaccccccgagcccagctccacacaccgttcctggatctcctctccccaggcggagcgtgcccctgcccagtccagtgaccttcgcctgttggagccctggttaatttttgcccagtctgcctgttgtggggctcctcccctttggggatataagcccggcctggggctgctccgttctctgcctggcctgaggctccctgagccgcctccccaccatcaccatggccaagggcttctatatttccaagtccctgggcatcctggggatcctcctgggcgtggcagccgtgtgcacaatcatcgcactgtcagtggtgtactcccaggagaagaacaagaacgccaacagctcccccgtggcctccaccaccccgtccgcctcagccaccaccaaccccgcctcggccaccaccttggaccaaagtaaagcgtggaatcgttaccgcctccccaacacgctgaaacccgattcctaccgggtgacgctgagaccgtacctcacccccaatgacaggggcctgtacgtttttaagggctccagcaccgtccgtttcacctgcaaggaggccactgacgtcatcatcatccacagcaagaagctcaactacaccctcagccaggggcacagggtggtcctgcgtggtgtgggaggctcccagccccccgacattgacaagactgagctggtggagcccaccgagtacctggtggtgcacctcaagggctccctggtgaaggacagccagtatgagatggacagcgagttcgagggggagttggcagatgacctggcgggcttctaccgcagcgagtacatggagggcaatgtcagaaaggtggtggccactacacagatgcaggctgcagatgcccggaagtccttcccatgcttcgatgagccggccatgaaggccgagttcaacatcacgcttatccaccccaaggacctgacagccctgtccaacatgcttcccaaaggtcccagcaccccacttccagaagaccccaactggaatgtcactgagttccacaccacgcccaagatgtccacgtacttgctggccttcattgtcagtgagttcgactacgtggagaagcaggcatccaatggtgtcttgatccggatctgggcccggcccagtgccattgcggcgggccacggcgattatgccctgaacgtgacgggccccatccttaacttctttgctggtcattatgacacaccctacccactcccaaaatcagaccagattggcctgccagacttcaacgccggcgccatggagaactggggactggtgacctaccgggagaactccctgctgttcgaccccctgtcctcctccagcagcaacaaggagcgggtggtcactgtgattgctcatgagctggcccaccagtggttcgggaacctggtgaccatagagtggtggaatgacctgtggctgaacgagggcttcgcctcctacgtggagtacctgggtgctgactatgcggagcccacctggaacttgaaagacctcatggtgctgaatgatgtgtaccgcgtgatggcagtggatgcactggcctcctcccacccgctgtccacacccgcctcggagatcaacacgccggcccagatcagtgagctgtttgacgccatctcctacagcaagggcgcctcagtcctcaggatgctctccagcttcctgtccgaggacgtattcaagcagggcctggcgtcctacctccacacctttgcctaccagaacaccatctacctgaacctgtgggaccacctgcaggaggctgtgaacaaccggtccatccaactccccaccaccgtgcgggacatcatgaaccgctggaccctgcagatgggcttcccggtcatcacggtggataccagcacggggaccctttcccaggagcacttcctccttgaccccgattccaatgttacccgcccctcagaattcaactacgtgtggattgtgcccatcacatccatcagagatggcagacagcagcaggactactggctgatagatgtaagagcccagaacgatctcttcagcacatcaggcaatgagtgggtcctgctgaacctcaatgtgacgggctattaccgggtgaactacgacgaagagaactggaggaagattcagactcagctgcagagagaccactcggccatccctgtcatcaatcgggcacagatcattaatgacgccttcaacctggccagtgcccataaggtccctgtcactctggcgctgaacaacaccctcttcctgattgaagagagacagtacatgccctgggaggccgccctgagcagcctgagctacttcaagctcatgtttgaccgctccgaggtctatggccccatgaagaactacctgaagaagcaggtcacacccctcttcattcacttcagaaataataccaacaactggagggagatcccagaaaacctgatggaccagtacagcgaggttaatgccatcagcaccgcctgctccaacggagttccagagtgtgaggagatggtctctggccttttcaagcagtggatggagaaccccaataataacccgatccaccccaacctgcggtccaccgtctactgcaacgctatcgcccagggcggggaggaggagtgggacttcgcctgggagcagttccgaaatgccacactggtcaatgaggctgacaagctccgggcagccctggcctgcagcaaagagttgtggatcctgaacaggtacctgagctacaccctgaacccggacttaatccggaagcaggacgccacctctaccatcatcagcattaccaacaacgtcattgggcaaggtctggtctgggactttgtccagagcaactggaagaagctttttaacgattatggtggtggctcgttctccttctccaacctcatccaggcagtgacacgacgattctccaccgagtatgagctgcagcagctggagcagttcaagaaggacaacgaggaaacaggcttcggctcaggcacccgggccctggagcaagccctggagaagacgaaagccaacatcaagtgggtgaaggagaacaaggaggtggtgctccagtggttcacagaaaacagcaaatagtccccagcccttgaagtcacccggcccccatgcaaggtgcccacatgtgtccatcccagcggctggtgcagggcctccattcctggagcccgaggcaccagtgtcctcccctcaaggacaaagtctccagcccacgttctctctgcctgtgagccagtctagttcctgatgacccaggctgcctgagcacctcccagcccctgcccctcatgccaaccccgccctaggcctggcatggcacctgtcgcccagtgccctggggctgatctcagggaagcccagctccagggccagatgagcagaagctctcgatggacaatgaacggccttgctgggggccgccctgtaccctctttcacctttccctaaagaccctaaatctgaggaatcaacagggcagcagatctgtatatttttttctaagagaaaatgtaaataaaggatttctagatgaaaaaaaaaaaaaaaaaaaaaaaaaaaaaaaaaaaaaaaaaaaaaaaaaaaaaaaaaaaaaaaaaaaaaaaaaaaaaaaaaaaaaaaaaaa

SEQ ID NO: 37 - DNA, 2613 bp, Homo sapiens
aaccgtctcctggttggggggtgggggggaaagatggcggagctgatgctgctcagcgagattgctgacccgacgcgtttcttcaccgacaacctgcttagcccggaggactgggacagcaccttgtattctggcctagatgaagtggccgaggagcagacgcagctcttccgttgcccggagcaggatgtcccgtttgacggcagctccctggacgtggggatggatgtcagcccctctgagcccccatgggaactcctgccgatcttcccagatcttcaggtgaagtctgagccatcttccccctgctcttcctcctccctcagctccgagtcatcgcgtctctccacagagccatccagcgaggctcttggggtaggggaggtgctccatgtgaagacagagtccttggcacccccactgtgtctcctgggagatgacccaacatcctcatttgaaaccgtccagatcaacgttatccccacctctgatgattcctcagatgtccagaccaagatagaacctgtctctccatgttcttccgtcaactctgaggcctccctgctctcagccgactcctccagccaggcttttataggagaggaggtcctggaagtgaagacagagtccctgtccccttcaggatgcctcctgtgggatgtcccagccccctcacttggagctgtccagatcagcatgggcccatcccttgatggctcctcaggcaaagccctgcccacccggaagccgccactgcagcccaaacctgtagtgctaaccactgtcccaatgccatccagagctgtgcctcccagcaccacagtccttctgcagtccctcgtccagccacccccagtgtccccagttgtcctcatccagggtgctattcgagtccagcctgaagggccggctccctctctaccacggcctgagaggaagagcatcgttcccgctcctatgcctggaaactcctgcccgcctgaagtggatgcaaagctgctgaagcggcagcagcgaatgatcaagaaccgggagtcagcctgccagtcccggagaaagaagaaagagtatctgcagggactggaggctcggctgcaagcagtactggctgacaaccagcagctccgccgagagaatgctgccctccggcggcggctggaggccctgctggctgaaaacagcgagctcaagttagggtctggaaacaggaaggtggtctgcatcatggtcttccttctcttcattgccttcaactttggacctgtcagcatcagtgagcctccttcagctcccatctctcctcggatgaacaagggggagcctcaaccccggagacacttgctggggttctcagagcaagagccagttcagggagttgaacctctccaggggtcctcccagggccctaaggagccccagcccagccccacagaccagcccagtttcagcaacctgacagccttccctgggggcgccaaggagctactactaagagacctagaccagctcttcctctcctctgattgccggcacttcaaccgcactgagtccctgaggcttgctgacgagttgagtggctgggtccagcgccaccagagaggccggaggaagatccctcagagggcccaggagagacagaagtctcagccacggaagaagtcacctccagttaaggcagtccccatccaaccccctggacccccagaaagggattctgtgggccagctgcaactatatcgccacccagaccgttcgcagccagcattcttggatgcaattgaccgacgggaagacacattttatgttgtctctttccgaagggaccacctgctgctcccagccatcagccacaacaagacctcccggcccaagatgtccctggtgatgcctgccatggcccccaatgagaccctgtcaggccgtggggccccgggggactatgaggagatgatgcagatcgagtgtgaggtcatggacaccagggtgattcacatcaagacctccacagtgcccccctcgctccgaaaacagccatccccaaccccaggcaatgccacaggtggccccttgccagtctctgcagccagccaggcccaccaggcctcccaccagcccctctacctcaatcatccctgacctctgccattcacactgacttagaacggggggagggggtaccaggtggccaggtgggactgtttcaaatttccctgatccccaggcttggggcaattggtaaaggaaagagcaggtgtgggggttaagcacttatttgaggtgggggtgttcacctctcttctcatcccttttcagaatatagggctcctctcattcctgtgaacccccagtcctggcttctttgtttgaggggattgtgtgaggttcagttgtggggtgggtggtgagctgctgcatattttttattttgtttctctagtgttatggcagtggaggtgggaatttagtccccaggtgggacaagggaagttttttcattttggagctagttactgggagtaagggagggtggggtgggggggagttcaggtttatgtgtgtgcatttcttttttattattattaaataaacaacttggagggagttgaaaaaaaa

SEQ ID NO: 38 - DNA, 1021 bp, Homo sapiens
ccaacgctgcggagatccagaggccggcggcgcccggaaacacccgcggagcttgccccctccccacccgcagacatgtccgagtccaagagcggccccgagtatgcttcgtttttcgccgtcatgggcgcctcggccgccatggtcttcagcgccctgggcgctgcctatggcacagccaagagcggtaccggcattgcggccatgtctgtcatgcggccggagcagatcatgaagtccatcatcccagtggtcatggctggcatcatcgccatctacggcctggtggtggcagtcctcatcgccaactccctgaatgacgacatcagcctctacaagagcttcctccagctgggcgccggcctgagcgtgggcctgagcggcctggcagccggctttgccatcggcatcgtgggggacgctggcgtgcggggcaccgcccagcagccccgactattcgtgggcatgatcctgattctcatcttcgccgaggtgctcggcctctacggtctcatcgtcgccctcatcctctccacaaagtagaccctctccgagcccaccagccacagaatattatgtaaagaccacccctcctcattccagaacgaacagcctgacacatacgcacggggccgccgcccccagtagttggtcttgtacatgcgcagtgtcctagtgcccatcgtctgtttccccggccttgcccccgcccgccccgtgccgtggacatctgggcccactcatcgcccctccaggcccccggcgccccaccccctagagtgctctgtgtatgcggatgatttagaattgtcatttctctttactggatgtttatttataaagatctggcctgttcctgcgtctgcggagcggcccttgtctcccagctatctataaccttagctagagtgtcgccttgtgggttcctgttgctgagacttcctggatggagccgccctcaccgccgggcccgtggccctgcgcggagctgtgtccaataaagttcttggatgtgacgggc

SEQ ID NO: 39 - DNA, 151326 bp, Homo sapiens
tacaaatgtactttgtttcatgtaattttatgagttggaagtattttcttaaattggaacactataagataatatctttaggaaatggatatgccacaataggaagtatagtggggcaagtcttgtttttctcaagggaaaagccaccagcctgctttcataggcattgataaaaccaggaagaaaataaagtcacaaccaaatagtatacactgtctctactgaattcttctaattccttcccaacagaagtctaaatcctgcttagcctaaacatatctatagccagcgatgggcaaattatatttgctgtcagcatgatagaataagaatcagaaaccccccagcagtggggtaagatcgtgcacttcatcccctcaaaatgctgtcaaccccattccctctccatgccctcaaacaactgcacagtcacttgttagtgaatttctcgttcagcgttttgtttttttctctccatacttaaagaccaaatcatttgtttgctctgaagaaaaagaaaaaacaaaacaaaacaaaaaaccacccaccaaatcatttgaaatcactacccgttaaaaaaaatcaccagtggaactaaacagttgagtggtttgggatgtgttcgccatttctgtgtttgacctacatggcctctagttctttggaccactgtaactgtgaaaccatggcttaatactgttaaagaccccaaggctcaactctgtagccagggtgtacctcaggctgcacaaatatcacaccagaatgtcacaatcattcattgctccagctactgagtgaacagggtgcaagacagcactggcttgggttgtatttttgcagccagttaactttgcatcaggtctacacagtccttgcagcctttgatttctccagttgtagagatttgaaatggggtgcccgggttcctctcgtttttccttcaacctacctagcatgcattttacacacattggaggagtcttatgcactgtttttctctgttgctgatggaggcaagaaggccttctaattagtctaacttaaacggacgggattcacctaacaaaagcaagaagaaaagcacaagaacaggtgtcttaatgcatttggataatttatttggggtgtgtgcgtgtgtgtgtgtgtcttggtggaggtgggggccgtgttctcaccaagccttttcataatcaagtttgctttgcaaactttatggccttacacccagcagaacagtccttgctaataaaaggaggatgccctgtcacagttctctgtaaattatcatgtgttgggaagttctgttgatgcttagtttgatcttccatggtggacacatctgttctgtatgtacaaggcattacatgtgtgttttagcggatgggaattgaagcctttccacagtccttgtgctctgagatggctgttgagctctgctcagctgtcgtagctgaattctttttttgtgctgaacactgggcagcctcaccatgttgtcaatgtgcttctggggcccctgtgactgctgccagatgccatgcacacaagcagagtgcctttgcaggtttgtgcaccccttggcgagctggaactgggagccctgtggggtgatctcgccttctcatggggggtcggggaggggagtgcctatttttaatcttgtctgtttgttgcaccatggaaatcactgtgatttgtatatatgccctaggaaatttttactgcagtctaatttatgtaataatgttgattccaggtttgtttaataaagctttgtatcttttaagaaaaaaaaaactgtagcatgtagaggaaagtgcactgggataatccaaggccaggctttgaggttccaccgctacattatgtgactcttagtctaaaccttttggtgtaatttctttggtctgattatttataagtagcagataataaatgaattttatactacaaacacaagtgacaagcttttgcctcttcttcctttttattaaagtaaaacatacataggtgtaacctcttaaataatttttcttgtcataaattacatatttgtcattttattgtagtgtttcctttgttttcttttgggttgcatatggattgttagtgatttgtatttctctcttatagttatttggaaaatatatctgctttaaatcattgcctttcttttttttgaaaccaagtctcactctgtcacccaggctggagtgcagtagcacaatctcagctcactgcagcctccacctcctgggttcaaacaattcagtctcagccacctgagtagctgggattacagacgtgcaccaccacacccagctaacttttgtatctttagtagagacagggtttcaccatgttgtccaggctggtctccaactcctgacctcaagagatctgcccgcctcagcctcccaaagtgctgggattataggtgtgagccaccatgcccagccaaatcattgcctttctatgcttttattttttagttttttggagacagggtctacctctgtcatccaggctggagtgcagtgacacaatcatggtggcccactgcagccttgaaactcctgcgtacaagtgatcctcccctatcagccccccgagtagctgagactataggtgtgtgccaccatgcccagccttttacatttgtttgtagagatagggtctcactatgttgcccagcttggtttcaaactcagcctcaagtgatcctcccacatcagcctcccaaagcactaggattacaggcatgagcctctgcacccaggcacttttctcctcttttcaaaaaatatgcttgaaaattcctttttttagtcatcaaagccaagactgaagtaaattatgcatgtaatgggcttcctgccccctccagctttctggccattgttaatttcacttgaatttataaaccaaattgctattcccaatgattttttacactatacatcttctccttaaattttattcttgacttttacactacatcttgttatcaccattatatttattatttagtctttactctatttcatgatgtgtctaatgaaaaaatcttaatttgtgttcctttctttggtaatgtttccaggaaaaatggctgggttatgtaagcatcccaacaatttcctaagaagaaagatatattttctgagactttgtatatcagagtatgtcttttggttgccattcttttggttaatggcaatatgatgtcttttataaacccatcccacattttttttttttttgagacggagttgctcttgttacccaggctggagtgcaatggcagaatcttggctcactgcaaactctgcctcccaaatctcagcctcccaggtagctgggattgtaggcatgcaccaccatacccagctaattttgtatttttagtagagatggggtttcaccatgttagtcaggctggtcttgaacccctgacctcaggtgatccacctgcctcggcctcccaaagtgctgggattataggcatgagccaccacgcctggtcctctttacttcttcatacccgatttgatcttcttccgtgtcaattcaattcattacatccaaaacaggttttactcatgagggaattagtgtgtcaaaaggctattaaaaagcactaacaaggctgggtgtggaggctcacatctgtaatcctagcactttgggaggccaaggtgggcagattgcttgagcccaggagttggagatcagcctgggcaacatggtgaaaccccatctctacaaaaaaatacaaaaattagtcgggtatagtggttcacgcctgtcgttagttactcaggaggctggggcgagaggatcacctgagctcagcaagttaaggctgcggtaagctgtgattgtgccactgcactctagcctgggtgagagtgagactctgtctccaaaaaaacaacaacaacaaaaaaagaggttgggcgcagtggctcacttctgtaatcccagcactttgtgaggccaaggcaggtggatcaccaggtcaagatattgagaccatcttggccaacatggtgaaatcctgtctctactaaaaatacaaaaattagctgggcgtggtgccgcgtggctatagtcccagctattcgggaggctgggggggagaatcgcttgaacccaggaggcagaggttgcagtgagccacagcaccccagcctggtgacagtgtgagacgccatcttaaaaaaaataataataaataaaataaaataaaatagaaaaaaaaagcactaaaaagcctgaagtcacacatcccaaagttagtgaatgagtggagtttaaacccagggctgtatggctatcatgcctgttttcccctactctgctacactgtctcctctgtaaatgttttgttttgtcttttggagacagggtctcactctgtcacccatgctgaagtgcagtggtgccagcacagctcactgcatgtaaatggttttcctagatttgtattttaatcaaatattcagagaaacaatgctccctgttctctctcgctggggatggtttcattgccttatcttatctattttctatttttccgtgtctgttaattcagcctcataatgggaaatggctgcagacctgggcttgctggctgagataatccatgggtgcttatggacttactccagaagggcttccccttcctatcaacagcctgtagacccttcgtgttttcaccttctgaagaggttgtgtaaggcgctgggttcggaatcacggaaggcccaggtgcaaacctcagcagtcccgggtaccagctgtgcagcgcaggtgagccgcttagcccctctcacccagtcacgagtgatggtgtctcgcgaggccggtgtaggacgagtgtggtccaggcgcagtacctgaaaagggcgcccagggagggagccggcggtcgttgggcgctctctcggcccgcacccgggcatccctcgacccgggctggaggggcagtgtcccgggatgcaccgctgcggggaccccccgcccggcctcgcggacccgcctcggcccaggacggaggaggaggcaggtgcggggcccggggcgggtgcggggacggcaggtggagggaagagggcatcgggccctgctcaccgcggtgtgtggggctgcccgaccgcgccccccgcaggtgccgcccagaccccggccgagggtcctcgtccccgcgcaggcccaggtcgaggccgagagagggcccgtgtccccgcgcagacctaggccgagagagggcccgtgaccccgcgcaggtcaaggccgagagagggcccgtgtccccgcggaggtcaaggccgagagagggcccgtgtccccgcgcaggtcaaggcccagagtccccgtgctcgcacagatggtgtcctggggcccagtcgcgctccccgctcgcggcagcccccgtgtactgggccttgcaaagtccgttaggagcgctccagggcgacagtgcccagcggttaacaagtttgtaattactttcgtgggtttctacgttgcaaattgagaagagggttgctgggttgggcccccctcctctggacgctaaccccacccaggtaaacagggatctggcccaggttcctgctgggtgccgaggtgggggattcagtggggagcactgaaatgtgctggaggcctggacgtgattccactgccaccaccccctttcccccggctacaaagcctcctgcggtgtgctttgtttttcccaggtagcagttattagccctgtatcatgactaaacgaacactaaagatacccttttacttattctcaaattcaaaacatgtatcaggggtccagaattatacatgctaggacctcaaaggtaagaaaggcacccacccacagccacgtgcggtggcacacgcctgtaatcccagcactttgagaggccaaggtgggcgaatcaccagaggtcaagagtttgaaactagcctggccaacatggtgaaaccccgtctctactcaaaatacaaaaataagccgagcgtggtggtgggcacctgtgatcccagctactggggaggctgaggcaggagaatcgcttgaacccaggaggcagaggtgacagtgagccgagatcgcgccattgcactccagcctgggcaacaagagcaaaacttctaataaaaaaaaaaaaaagaaagaaaggaaggagggagaggaagggagggaaggaaggaaggaaggaagccttctcttgtggtcatagttcagaggactgaatcactctgatatttgagcttaccctcaatttcaaaactctcattagaaaatgtttttaaatcacctgaaatgagaacaaaatctaagtagtatgtggagtgtagagatggtaaagcagtccagttaggttggtttgggcagcgtaagtgtgcatcgtcatgcattaaccaacagagaaccagtgccagggtccacaccaacagttttcaaaataaacagtctcaattagacctgaatatgacaggtgtggtggctcatgcatgtaatcctagcactttgggaggctgaggcaggtggatcacctgaagtcaggagttcgagaccagcctagccaacatagtgaaaccctgcctgtactaaaaatacaaactagccaggtgtggtggtgggcacctataatcccagctactcaggaggctgaggcaggagaatcactttagcccaggaggtggaggttgcagtgagctgagatcctactactgcactccggcctgggtgacagagcaagactccatctcaaaaacaaacaaacaaaaaaatttgacctgaataggcaacagagtttatcacaaacagatagcatagataagtattattttatgaaaatgtggtttcagttatatacatgtgtatatatatatatgtatatgttcatacatatacatatatatttgtaggggtatttgtattagatcatgatataacatgtatttattgtgaattacattcttaaaattgttactgagtttgaaccaagacaaattcgttacatatacagaaagtgccctatggtagtaataattattgcatactaattatttccacaattggaactatagaagagttcagtggtattttatgcactaattagctccatgttttatatttactttacatagtattagcatggcatgcatttgagtgtctgatttatcacactaagaatagatcattcctgacttgtaaggaatgcaatggcagaattgctccaatatgtgagaacggtcactgtggcggttgccgattatggaagccatgagccattattgttaccatgaaaatacgcatgatttatacattacttctactgttgccatgcgtgaccaaataaggatcttttgctttacattgtttctgctggaacaaagtaaagaagttcaacagtccaagagttttcttttctagtccagttattatgttactttttcagaaagcttaggatcttgataatagttcattcctgaggctgaaggggtttcattattaacaagtcagataattttcatttcagttttgataaaagatttttttttaattttgagcaaaggttgaagcacttaatgcttattgtaataattagttttatattttctattttgattgattcattggttgattttgattttaaggatttaaatagctgaaagtatggaccatatttctaggaaataatttcctggtgtaccatttatcctctaatggttactccagacatttaattgtaaatgactagtatcccattttgtaaataggccttgccgagagtttaacaggatcaagcaaattatttttatttttaccatacttactgttgtcataactgctttgatgagagctccacaaatgaatgaatgaacgttataatttatttatctaaatattgtgacatgttactactttttagtaaatttaatttttattccattttttaataagagactaatttttggcaagtttatttcagggaagctatgagtcatctgtctgaacaaagataagtgaatagaaatcatcctgtcttactgaacacgttcaaacagcacccaacaaagaaacaggctagctcacatctaaatttctaattcaaaactggtccagtacaacagaggttaaaaaaacaaagattccagtttctttccagtttccttttccttattaaggtcttagtaaaagccagtgaggaacactttttttttttaagatggagtctcgctctgtcacccaggctggagtgcagtggcacgatcttggctcactgcaacctccgcttcctgggttcaaggaattctcttgtctcagcctcaggagtagctgggattacaggcatgcgccatcacgcccggctaatttttgtatctttagtagagacagggtttcgccatgttggtcaggctggtctcaaactcccaacctcaggtgatccacccgcctgagggacactgcttaaccaacttagtaagttatggttttcttcatatctcttaagtgccttccaagatactggaccccagcatttgctgcttgccacgtagctcagctgatctgttgatagacccccacagagggacagtgaatgtctgctggcattcagggatgccctagctttttctaaccaaagctacagactctcagtagctggaaagcagggacggtatctgccttgttcactgcgatttctctatttttagactcatagaaagtgcatagtaaatcattgttgaatacatgaaaacaccaaagaaagaaggaagaacagcaggagaaagtatacgtagcttgaaacaaagggggagagacataatctgctcagagtttgatatcatcctcagataagagtgtgttatccactcttaactaatacatttgagggtctcttgtcaacccaacagtgtttctggggtgagatctgggctcataggatgaagagcttactggagtcagaacacatacctgtacgcgcacataggtacacgtgtgccacacgcaactctgatcaagttgtattgcagaagcagtttgtgctatactgttaaagaataaggctgcatataaaatggggctaatggtgtaatttggataattagcataaagagtttaggaagagaaaggttaatttttttttatttgagagagagtcttgctctgtcacccaggctggagtgcaatggcacgatttcagctcactgcaacctctgcctcctaggttcaagcaattctccttcctcagcctcccaagtacctgggattacgggcgcctgtcaccacgcccggctaattttttgtgttttcagtagagacagggttttgccatgttggccaggctggtctcgaactcctgacctcaggtgattcacccacctcggcttcccaaagtgctgggattacaggtatgagccactgcgcctggacaagaaaggttaatctgagaagcagtttcccagaggaaagggatgggacttggataacaagggatcacagatggggcctgagccaaggtcagagtgatcatagccagtgggctcaaccaaaggggacaatagtattgggtttggtggacagtaaggtggggcacatggggtagggattgaacttcagagggtggtttaggaaatagataatcctagaagtttagatttaatgtaatcagcataaagaagtcatatttctggagcaagaaagtaatttgatgggggctgtgttttgagattacttggtaatagcaagcaggaggacagctccccctcaggaccagaaagggaagggaaacagcctcctaggactgcaatctcagcaccactttcagtctcactgatggccagctctcctgggatgctttgatgtcacagaagcaactgataaggggaaatgcattcagttttgatcttccccttgagagggtctgaaatgatcaaagagtgaccaagcctacctgatatggttaatctttgtgtccccacccaaatctcatcttaaattataatccccataatccacatgtgtcgagggaaagaccaggtagaagtaactgaatcatgctcttctttcccccatgctcttctcatgatagtgagcaagttctcctgagatctgatggttttataaggggttcttctccacttcactcagcacttttcttccctgctgccttgtgaagaaagtgccttgcttcctcttcaccttccaccatgattgtaactttcctgaggccttcccagccatgccaaactgtgagtcagttaaaccactttcctttatgaattacccagtcttgagcagttctttataacagtatgaaaatggactaatacagtacattagtactgcagagagtggggtgctgctataaaggtacccaaaaatgtggaagcaactttggaactaggtagcaggcaggggttggaacactttggagggctcagaagacaggaggatgtgagaaagtttggaacatttcagagacttgttgaatggctttaataaaaatgctaatagtgatgtggacaataaagtccaggctgagatggtctcagatggagataaggaacttcttgggaactggaataaagttgactcttgctatgctttggcaaagaggctggtggcatttttcccctgccctagagatctgtggaactttgaacttgagagagatgatttagggtatctagtggaagaaatttctcaaaagtaaagtgttcaagaggtgacttgggtgctcttaaaggcattcagttttacgcattcacaaagagatggtttggaattggaacttatgtttaaaagaattgcagagcatacaggctcagaaaatttgcagcttgatgattcaatggaaaagaaaaaactattttctgaggcgatattcaagctggctgcagaaatttgcataagtaacaaggaaccaaacgttcatcaccaagacaatggggaaaatgtctccagggcatgtcaggggtcttaacagcagctcctccaattataagcccagaggcctaggaggaaaaaatggttttgtgggctcggcccagggcctggctgcttcgtgcagtctcaggacttggtgccctgcatgccagccatggttaaaagggaccaacatagagcccaggccattgcttcagagggtgcaagcccaaagtcttgtaagtttacatgtggtgttggggctgcaggtgcacagaagtcaagaatcaaggtttgggaacctctgcctagatttcagaggatgtatagaaatgcctggatgtctaggcagaaatttgctgcaggagtagagccctcatggagtacctctgctagggcagtgcagaagagaaatgtggggtcagagtccccacacagaattcccactggggcattgcctagtggagctgtgagaagagggctaccatcctccagaccccataatggtagatccattggcagcttgcactgtgctcctggaaaagccacaaacactcaatgccagcctgtgaaaacagctgggagcagggctgtaccctgcaaagccacagggacagagctggccaaaatgacaggaaaccacctcttgcatcagtgtgacctggatgtgagacatggagtcaaaggaggttattttggaactttaagatttaactgccctgctgaatgtccaacttgcatagggcctgtagtccctttgttttggccaatttcacccattttgaatgggtgtgtttacccaatgcctgtaccaccattgtatctaggaagtaactaacttgcttttgattttacaggctcatagatggaagggacttgccttgtctcagatgaaactttggacttggacttttgggttaatgctggaatgaattaagactttggggaactactgagaagacatgattggttttgaaatgtgaaagggacatgagatttgggaggggccatgggcagatgatatggtttggttgtcccacccaaatctcatcttgaattgtaatttccataatcctcacatgtccatggagagaccagatggaagtaattgaatcatgagggcagtttcccccatgttgttcatgtgatagtgaaggagttctggtgagatctgatggtttcataaggcgctcttccccacttcgcttggcacttctcctttctgctgccttgcttcctcttcaccttttgccatggctgtaagtcccctgaggcctccccagtcatgctgaactgtgagtcagttaaacctctttgctttataaattacccagtctcaagcagttctttatagcagtatgaaaatggactaatacactgccaaacagccacaatgctacacatgctcacttcaatctcaagcttggtctacatttctctaatgccctctggaacaaccaaatcttttgttaatgagaaggcagacagtgtgagtgtctttttcttgggaatgggtcatagttggctgacattacaaaccttagcctagcttgtgtttttcacagggcacccccttgtgcttttttaaaaatcccactagagaattcacaggctgaagagagagtaccccttcttgagtgtcctaggtttcccaagtagttctcccagttctgtgttagcaagtggcagggtaggatatgggataggtggtagaataggaggaagagggaaaagctaggtcataatctccttaagatcagggacattgccttcatctttgtatttcaagcaccttgtgcaatacatgtgtcagatgaatgatggctaggtgaataagaagcattttgtttcctcattgtcctgttcagatatgacatgttatcaacagcccagatattattcagacactcatcacccttttacctccttattcctcctatctgtttagtggtggtgcaactcatataaatatattcaaagcacatggaacattgactgaggtgcccagcccagtgttcagtaaaggaattgtggatattgaagctactaagttctatcttccagactaagacagtcacgggattggttatttggggaggtggaaactttatctgccgacttctgtccatttcctaatttcatattatgtagtcttagctcctcatttaaaatccacaacttaggccagtcatgctggctcatgcctgtcatctcagcactttgggaggccaaggtgagcagttcattcgagcttaggaattcgagaccagcctgggcaacatggtgaaaccttgtctctacaaaaaatgcaaaaactagccaggcatggtggcatgtgcctgtcgtcccagctacttgggaggctaaagtaggaggatcccttgagcccaggaggttgaggttgcagtgagccatgatcacactgatgcactccagcctgagcaacagagcaaaaccctgtctcaaaaacaagcataaaaaacaaaatgcacaacttattacttcatggacgtgggatatgaaatagtaaatcttgagagtcaatcttctctgtggtcttaattcatgcttaacatatgagcataggaatatccccacttcccatgcacatatgagcacagggatatccccacttcccgtgcacatatgagcacagggatatccccacttcccgtgcacatatgagcacagggatatccccacttcccgtgcacatatgagcacagggatgtccccacttcccgtgcacatatgagcacagggatgtccccacttcccgtgcacatatgagcacagggatgtccccacttcccgtgcacatatgagcacagggatgtccccacttcccgtgcacatatgagcacagggatgtccccacttcccgtgcacatatgagcacagggatgtccccacttcccgtgcacatatgagcatagggatgtccccacttcccgtgcacatatgagcatagggatgtccccacttcccgtgcacatatgaacatagggatgtccccacttcccgtgcacatatgagcatagggatatccccacttcacatgcacatatggatacttctaattcgtgcttacatatgagcatagggatatccccacttcccgtgcacatatggatacttctaatcgtgcttacatatgagcataggcatatccccacttcccgtgcacatatggatacttctaatcgtgcttacatatgagcataggcatatccccacttcccgtgcacatatggatacttctttctgcacttgtgtgaacacttttgctcatctgtgtgagtgtgtgcttgtgtctgttttggcagtcatgctatatttttattcttgacatccttagctccttcaaaagatgtgatgtgcctggcacatggtatgaacccagtaaatactggctgaatgagttaatgactgaacactatgttcagagaacagtaatgcctgcaacttggaaactttacacaatccttgtactcaaaatttaagtggagaaactaagtctatatgcataaaataaagtctgttacaaagtaacataagaataaaataaaattaattaaatatactatggatgccaaaatctgagataggtctcagttaatttagaaagtctattttgtcaaagttgaggacacacttgcatgacacagcctcaggaggtcctgaagacatgtgcccaaggtggtaggggcacagcttggttttatacaatttagggagacatgagacatcaacacatgtaagatgtacattggttcagtctggaaaggtggaacaacttgaggtgtaggtgggacaatttgaagtggggaggggacttccaagtcataggtcgataagagacaaatttcagagttgtaaaaacattgaatgagttagtatattgaaaagcacttagaacaatacctggctcagagcaagcacagagtgaatgttagctgtgattatgattataattatgatgactataattattattagtattgtgaaaggaaaataaatcttggggccccaaaatcactaagctaaagggaaaaagaaactggaaattgcttagggtttgccctaagcaatttgagttgcattcttttgagtttctgattagcctctccaaatgaggccatcagatgtgcatttatcgcagtgagcagaggagtgactttgaatagaatgggaggcaggtttgccctaagcgatttccagtttcttttccctttagcttagtgatttttggggccccaagatttattttcctttgacaatactaataatcattatagtcatcataagcataatcacagctaacattcacactgtgcttgctctgagccaggtattgttctaagtgcttttcaatatattaactcattcaatgtttttacaactctgtaagtatcactattattttcctcattttgcagttgagaaacctgaggactgagaggttaagtgacttgtctggagtcacacagctaaaaagaataaggtcacatagtgagcacaaaatggtattgagggttagcaatgaacattttctggaggaggcaagttgagtcctgtcctgtcccatcactgacagccacacctgtaaccaggggctgtattcacaaatggccattacccatctggccagccctcagagggagtggtgagctgagagagacagtcgtgttgagagcctgctcacatggtgacatggtctggcctgcatacagcactgcagccttcccagagtacatgctaattaattctaagactcctttgcatgaagttctcagtattgactaaactcttcaagggaaaaatctccctatttcccagcaaactcagagtagagctgacctccttcatgacacagcatactgacttcaagttttgaaagaacccagtgggctggtcatggtggctcacgcctgtaatctcagcactttgggaggccgaggcaggtgaatcacgaggtcaggagatcgagaccatcctggctaacagggtgaaaccctgtctctactaaaaacacaaaaaaattagctgggggtggtaacacgtgcctgtaatcccagctacttggggggctgaggcaggagaatcgcttcaacccgggaggtggaggttgcagtgagctgagattgcgccactgcactgcagcctgggtgacagagcgagactcaaaaaaaaaaaaaaaaaaagagagagagggaaggaaggaaggaaagaaggaacgaaagagaaagaaagaaaagaaaagaaaggagaaaagaaaagaaaagaacccaatgaattggtcctcaaaaagtaactacctactgtggtagagaggaagagacacaatggcaaatatatagatacataaatgtactctgtcagcatcaagtgtcaactctgtgccaggaactgttctaacccctggggatttagcactgaacacggcagacgaaaattccgtcctcctgaagcttacgtgggggagaggcagataagagatacagtaagttagaaggtgacaggtgacgtggaggaaaatgaagcaggagaggggctggagtttgtagggagggaggcccccaggtgagtctggatgcaggaaagcagttgtcctcccgactaatttgacagcagagggtcttctcctcagttttctcactttctcaccaagtggcctctcaggttatccggcaaagagactttcaaccctgggccaggatgagtgtggaagcggagtggagcggggaagggaagatgaagttcaggtcctctcatcctataatccatgtggggatctagaggcatcattgtggcagggaggagagatgactttatgacaataagacataggcttcacatttgagcggggtaggtattgatccagggatatgaagatggctaagtcatgtcccttgagaattcccagtgtagtggggaaccacttgtgaagacatttgcttgtttcattttatccaacaggagcttttccacacacttctttaaagaatgcagtttggtcttactctgtcgcccagtctggagtgtattgggccgattacagctcactgcaaccttgacttcccaggctcaggtgatcctcccacctcagccttccaagtagctgggatcacagctaccatacccagctattttttttttttcttgtagagacaggattttgccatcttgcccagtctggtcttgaactcttggacgcaagcaatcctcctgtgttggcctcccaaagtgctgggattacaggcatgagccatcgcacctggcagtttggtagcattttgacttaaatttctgtctgtggacaaatagcatttgaaacgtctatgaaaatgataagataaaacatgagaagaaaacagtttgttgatagtaaaatctcaaaaattttgccggttaggttaagaacaatagggcaaaaactgtatatgttaagtttcttggaagggattccttcctttgagggaaaagcctgttgattcttacgttttcttctctacgaaattaggttaaggatcggctgaaagcataaaatgcagcttagaagttgcccgcttccccttcttccccatctacacccatgcaactgtgggacctctgcccttggctaggagagcttttggcactgtgtcttgctgctggcgcccagactcaattttcctgcatccggcttactgtgttttcctcttctagttcctaagtggctctccagaaccttgactgggtttgtctctggtctacacttctcctatccctctccttcccaatttactaggtgaaaggcacccggtacccgctttgtaatgcacccctactgctcccgacaacacctctccactgtcatgcttaattgtctacatttcatttgtcagaggtccgacgttcactttttaaaatgcaatgaatcattaacatgctaataagtgatttaatatctattaatgaggattcgcaatataaaactgatttaatgtctcaactcactgcttccgttttctcataaaaggaaacagctaagtactacctaggagaaatgatacccacgtgcatgcatcttgctctttcctttaatgcttcctggggttctatcttttctcttagcaatgcactgatacatttatggtgaggcacaagtaagaaagagaagaaaaaaggaatcaccttaggaatccttgagataaccatatttgctttgttttcaactccacacacagcctatttcctgccctgggttattttcctcagaggagctgtggagatgactagacttacacataggtccacagctcccacaaagtcttcaccagcaaaccctccgagttcctcactcccacagctcccacaaagtcttcaccagcaaaccctccgagttcctcactctcattcctctagcacaagttgtgcaatagcctcatttttacatcttgcccctgaagaagggggaagaattacaccttgacagtgactcaaaaaagacagcagatgctgacggggttcttttgattaacaggagttatagaactatgtctaaatagttccgatttgatttgaacattatattttatcagcaaataacatgtgtttcattgtagaagtaactaaaacaaagcatgaaaacatgtggttctacaatattggtttttttgttttttgttttttgtttttttgagacaggagtctcactctgtcacccaggctggagtgcagtggagtgatcttggctcattgtaacctctgtctcctgggttcaaggaattctcctgccgcagcctcccgagtagctgggattacaggcgcccaccaccatgcccagctcattttttgtatttttaatagagatagggtttcaccatgttggccaggctggtctcaaactcctgacctcaagggatcctcccacctcggcctcccaaagtgctgggattacaggtgtgagccactgttcccagcctggttccccaatattcttttggcttgtttaattctgagtaagagagtccaaaatagggttcaggacattcttttcccgagatatccccggagtgaaaatgagtgttggatgatcactattttgggtactaattgtttgaccagtattgaacagctgagctccaggggtagaaagagatctaaggcttgtccagtgaggattcccaaagtagtggggaagcagatacaaaaatcagttaagttgtgatagagtagtaggtgttgcaataaaggtatacccacagaacagagagggccgaggctagggaagcttgagcaggattcagactttcattaggcacagaggcgagagagcagctcatggcaagggcccagaagctgcccactgttgtgtctggaatctagtgggaaagggcaaaaggaagtcctggagcagcaggttgcgagcaggccattgtgccaaggagtctggtcttgatcctataggtagaaggtggctggtagagtttaatcagcagaagaaaaagaaatgagaatgggaatgtgagttaggtgacaattggatgaagatggaagcctcatgtcaggaaaccaattctgcagtggtctcctggcagaaggtgaggcagacctgaactgagcctacctcggttagtggccaagtctgctttaaattcatcccttctgccagatggttttaaaaatgcatgagcccattactgaaaaacagaacgtcttcgaagagaaaggcagaccgggaagccctgagtgagaagtacccagtgaaaggaagggcgtttatcaatcctctctctttgaactaaattcattagtgaaatctgagaaactttggagctttaatgaatttgaaactggtgtttccctttatctgcatctagtccatttttaatttgcggtcatctattagctgatgaaaaaagaaaaatgtctttcagcagttgaagacagctaatgagaatcaggctctcagtgtgggcggtactgctgatgtttggtttgtgagagatacaggaatcaacttgttgaagctctctacttgtcagagcacctttaaataatccaagcccagagttgtttcatcttcaggcaagagaaagtgaaaatggcttcaaaggtacaatatctcaaataaacactataaaatgcatccacacttgcctttgaaattgtagtggttcaagcacacagagacaagcaacaatgtttatttcctgatactaatgagcttgtctgtctttgtctatgatgattgttcttagagacaaacaaataaaaatgcgaattatatctgactgttctaagaagaaaagattgccagactattgtattttttggcagttatatgcttcaaaaaactgatcgttttctcaattcctaggaagcgggcagagaaatcacattcctgtggaccaatgctccttagtggatgagttttgtggcatggtggtgatttagttagtaagaagccctgcctgttttctggagagtactatacttgtcgaaccagctcctaggacagtacagggttgtgactggtgttttggggttctctctgcgcataagccctttccttttaatacaaacagcaagatcatcctgttcagcagttgacagatgactgtgtgcaccaaaaggcaacaacgatgaggcaactgatgcatttgtaactcaatgtctcactgaattccagctttcttttctcaaggtggtgaaacaggaagcaacatcccatcaggaagaacctgagggtgccatccagtagcttcgcctcacgtcactgactgccctcagtcagaaatcttgactcgcaactttggagggtgggtctctgaaggaatttcaggtcttacacagagatgagttgtgctgctctctgaggagaacgaagctggttggaacgttggaagctgctctctgactacacttcacaagcaaggggcaccttttgtggactgacatttcagaaaggtaggcgccatcccatggatgtggttagtatttgaggactttcaaaaccaaggtggccgtgattccgcgtgtgagcttgtgtgtgtatgtgtgcctgggtgcgtaacagagagggagaggagatggagattgggggagaggcggacaaatgaagaaatgttcatttttggtctgatgtttgggagaaatacagaaaagacagacttggggccctttgctttgtagagttttgcttggaagtgtttagtagtagagggtaaatttcgagtccaaacttccactcctgacctgcattgctctcgggcgagtttaaactgattcattgagggttaggaagaaaggtctgggcagtgaaatcacacacggctgaatgctcagcatagcttggtttatcaggaaagccctgaatccaggtggaatgaaaggggtcagcacagatctttgccaggtggcaaaggccatttcagaccatcccagagtgccttaagctgagaacaaggtgggacttgctcaccccacagtggcaggccttcctaagctgcttctgtcttgagagatgtagtgctcaatgtcatgccaggagaaattagctgttcggttctaaggctgccagtctcatgcagaaaagtgaaacaaaatcaaactactttttctgatccaagcaaatgtttagcaagaatgttctgttaagcatttttatttttttgaaacctttacacaaaacaagggaaataaagctttagggctgaccagataatgaattttaatttattcattaacccacaatgttcaagtgccttctctaccttaagtgagtgtttgactttaaacttcacattttcattgccttcccccctacaagccttttgtttttcttaaaaggggtttccatttataatttcttcagtagaatttctggataaaaagttctttaaagagaaaatatgtatatgttcaaaaaggtaataattatgtggccctctcattcacaatatttctgcctttttctaaaatatcaatcaaattgatttacataagtttgaagatcattctgggctaataataatctacatttactaagtccttgctgtgtgtacgtgcattttcccctttagggctcatgatacgccactttcagacgaggaattgaggcttagtgagatttacagtggtacagtagggatgtgagaaagccacagctttattgcatttctgcacactaagatatatgatttcagctcattctatattcccattctattccattaaccccctacagggtccttgtgtggagggattcctgaagctatgataatattcaaatactcgaatttggtgtcttataacaaaaggccaaaatcaatcaatcaatctatcacctgcttctgctgttggaggaaggcttggtgtggtggacagaacattgactagaaagacagatcaaaattcaaattcctgcatcctgcttactaactatgaccctggcaagtcactgaaattccttttttatttttttgagatggagtcttgctctgtcactgaggctgcagtgcagtggcatgatcttggctctctgaaacctctgcctcctgggttcaagcgattctcgtgcctcagcctcccaagtagctgggagtataggcatgtgacaccacacctagctaatttttttgtagttttagtagagatgggggtttcgccatgttggtcagtctagtctcgatctcctggcctcaagtgatctgcccacctcagcctcccaatgtactaggattccaggcataacccaccacacctggcctcagtgcaattcttcaaatctcagtttccttatttataaaataattattataacatccatcaaacgaggttgtttattataagacataaaaaggcagggtatgtcaaatgccttccataggacctgacagagggtaggcccttggtaaacagtattcatttccccattttgcagtgatttcttcatgctcttgacatgttggatcctgttctaggattgggggtatcaccagtgaacaaagcagacaagtccctgccctcagggagttgcctttccactggtacttgttccttatatcctagtgtactttcttgggaaatcactttgtgattatctttctttgtggagctgatccagctttcaaacagcctcttaaagtaatgaatgtcctatgccaaaagtcccccaaagcatagtaaaatcaagcaaaaagcaagaacatcagatacttctttttcaaaagtcagtttgttgtggtaggccaggaaagttgtttttacacacacacacacacacacacacacacacacacagtttatgtaggttttccctggcctccacaccacagcagaagcactgccaggagctggcagagtgctcatgggaggagggtgctgggctggctccaagggagctccctccgctcacagagcacggagtgtatcgtggcaactgttcatttatcttgggccccaagccatccacacaagaagcttggactttccaagccctccccaacacgaatttatgggatgcgatgcaaagattgacctgcaggtgtacacctttataaggatggatttgggacaaaaacgattgacttatgttttggcaaaaagcctgcagtcaagttcatcaagtaggccagctggcatcaagaatggtgttttggcaatctatctctatgtttgaatccagagaaactgcagatcatagcagagagatagcagaggggaacacagagaagctctctctggaatcagatgcaggtagattcttctttctcctggaaacacctcaacacacaatacaacgatctaattgatcttatacagcccgagtttatggttttatttactggatggacccaggatgattgaaaaaatccttgtgccaacactagacagaccagacagttggcagtatgaaagaaggcattctaaagtagtgggacttactttcctaagtcctgtgcaacaatcaagcccatcattttacagccatgctgtatgtgctgccttaagatttgtccttgtagctggaatttacaatgatgaaaacataaatgaagctaaaagtctaattaaaataaataaattagggcttatgtataaaaaccccaattggcaagtgaacggagagattaagaatctttgaccttgtaacaaaactgtaacagccacaattctccacagggctttctgttgatggtggacagatgttcaattgtaaatgggcttcagttagatcacttccaaaggttgttattatcataatttcaaggctgagaatttccattaataaatagaaaatagctctgataagaaggagatttggcttggatgtccatgaaacaaattttacctttcccaaatatgagaatttaaaatttcttcatctgtgagtatcttcctgctacttaaatataaaattaaagggttctggttatttatttttttggcctacctgcccactggaaaatctgtggagatgatttgtgctggtggtggattatatgtttcaatctaatggaaagtttcctctttattgttttctgagttaaatatttaggaaataccaggaaactaagatatttaaccaaaattcccaaatctgtctgctcaggattggtaaacacacactcacattcatacacatgtgtgtatgtgcataatatgaaaacacaaccaaaagatgcatacatttctcattaatggaaaaagtgtaaaattcacaggtaaggcatatatttaggttatttggagaggtaaaatattacattaaggagcttgaaaccacttttacttactatattcaggttctaagatgaagtacttagtgaagaaaaatcatatgtgataatccatttaattctctgctgggataaggtctatttgttttattttgatttctttgccagacatattttactggatagtcaataaatacttgttgattagattgaccctgacacaggctgaacaataaactaatcatttcaaaatttaagcaaaaaattctgaaaacattttcttcaataatgaagattacttgacatcatttaataactaacttggcttcaatttcttcccctcaaagtttgttttcttgtttgacatatgattaaaaactttaaaaacatacaacatgctgatgctgaacaaatgtcaaattctgcagattagcaattttcatttgtaatgttcacatcagaggatcattactatattccactttgggtcaaagttacagggtttcataatgagctattcctatcccattagctgtaacttgctttacctggcttgattccaacagagatccgccttatgtggaattctggactataactaattgtgtaagagtaaaacttcagagcttttctagatgatgactataaaatcgtatgcaacttgaattttcctaagtggttgttgtgtagattacactattgcagtgattttcaaacgtttttaaccattactgttagtaagaaatacttttcagatctcaacttaggacatatatacacacacaattctgaaataatagtttcataaaacaatacttataggtattgttttctatttcatttcattacactctacaacatttctggtcataaccgactaattaattttgtgacctactggtagtggttctcaatactgtctgaaaattaaaatcaactagggaacaatagaccaatggaatggactaagatgctagaaaaaaaacctccacaaatttggacctttgatttatgacaacattggtactacaggaaaggacagacatttgaatgtccatgtacaaataaatgagtcttgattctcatcttaaaattcatacagctctaagtattaatctagatgtgacaggtaaaacaatataacttctagatcttcactgtccaatatggcagctgctagccacatgtggctattgagtacctgaaatactagaaaatttaaaattacatatgttactcccagttttcttcctactgaacagcattgttctagatgacaaaacagaatatatgtatgaccttgggtagacagtgatttcttttttttttttttttttttgagatggagtcttgctctgttgcccatgctggagtgcagtggtgcaatctccgctcactgcaagctccgcctcctaggttcctgccattctcctgcctcagcctcccaaggagctgggactacaggcgcccaccaccatgcctggctaattttttgtatttttagtagagacagggtttcaccgtgttagccaggatggtcgcaatctcctgaccttgtgatctgcttgcctcagcctcccaaagtgctgggattacaggtgtgagccactacacttggcgatttcttaaacaagatacaataagtactaacatgatgaaaaagatctgtaaattggttatgttaaaaataaggacttctgtttctcaaagcataccactaaaagagtaaaagacaaactgcaggagaggagacatttgccatgcaaataacatgtaaggagtcatgcatataacatgacttgttatgcatgtaacaaacaaggagtcctatccaaaacagaaacaaggcaattttgaaagatagaccgccacaacagaaaaatgggcaagaggtttgaacaggtacttcacagaaaaacatattcagacagccaagagacttgaaacatactcaaccttgttagctttctggggaatgcagattaaaactgcaatgaagtaccactacacacccaccagaaaggtgaaaatttaaaagacagacaatagaaattttggcaaggatattaaaccactggaactctcatacgtcactgggaggagtgtaaatagtcacaacagctttgaaaaactgttcagcaatatctgttaaactgaatatacatatgccttatgacctggcgtttccactcccaggtatatgttctacagaaatgcattcacgtatttacctaaagcatgttcaagaatgttcaagaatgttcataaatggcaccttgaagtgttgtaatcccaaactcaaaacaacccatatttccatcgacaacagaatgggaacacagatcgtgatatagtgatatagtcatgggatggaatattaaaagtcaacgaaaatgagtttgctactgttacatgcaacaacatagatgcatctcagttctaaaagttgagtgaaagaatccagatgccaggaatgtgctcaaaacaatcgtatttacataaagttcaagaacaggcaacacggatccatggtggtgacagggagaggcatgaggaagagtctggggtgctggtcatattcttttgtgctttgtttctttaccatctgtatgttatacttcaataattatattacagtaacaatacagcagtgacaatactgataccaggactgcaccttcagagatcttggtttagttgatctggttaggtagaaagcatggtcaaaaaatctctcccaaggaattcacatgtagaaccagggttgggaaccagtgcactaatggtttacaactggtcctttgaaaacccatgtgctatgacaaactgtaattgttacaccaggctgtgctaggcccttattatctctgttcaagttacactgacttgacgacataattcatattgagaaatgttagcaacataaggagtcacaaagttaactgacctagaaagccggtcaggtgcctgaaaacagttggccaggttggtaagcgtgtgttccatttaagggctccagtgattcttgccagtcttctgagtttctgagtgaagctgcaaatctggatttctatgtgcaaattcttgaattttcagtgttggctcaaattgttttaaagccccatgcaccagtccaaactgattggtagacccaaatttgccagcaccaagctctcccgttggtttgaaactctgacttaagttttagacctattatagaaggacgcttatgggcacagttgtgtaatatattaattatgtttctctttttctgcttctttagggatgttgtgaaacaaaagctgacatttatatatatatacatatatacagtatttgagttcctcagtagaaagctatcatatatactcaggtaattatctttattttattttattttacctctactgtgttttcttaactataatcttgggaaattaacatctgtgactcagaagttgatatctggcattgttttgcatattctggggacaagtggagtttgggcaaagccagtaccatgctattctttatgaaatactatagatttgtattctttccttttgaaagcggagatgcaggagaaagcttcatgtgacagcagcaggtagcaaagagccatcagggggtggcatttgctgtctgtgctctggtcttccacccccataacacctgctgttctgatgggaaggaaggaagagctggctgtgctgggcaggtctctagcttccagcgtcttacctgtaaggagaaactttcaaaaccacattccttcaaaatcataaaatatgaccccaaatgataaaaaatcatcatttgtacgaggaagagtcattcatgaagcatgttcgcaaatattgacttgatgaaaggcaaagtcaggtaacgtagaggggaggagttgcacttttaccgttaatgcctaaatttgagtctggctctgtatcaccttgagcagtcactttatctctctaaacttcattgttcacctgcaaattggaagcatgcataattattattgttgtaaggattcaatgagtgtgggtgcaacattgtaagctgtggtatgtacagttgttcgttataattttaatcatcttatttactttttgtaacggtctgtgaaaagctggtattattattcccggttttgacctgcaagaaccggatattcatgctgctggatgcctgatcccaggtctatgctctcccggcaccagctgtgcttgctgacacagagcttcccctcctccccaccctgcccactcctagtgggacagtggagggctcaggcagaaggggctcccatccaaggcaacactctgccttgggcctgtcattttctacaccttaccaaaagttttgctaaacagcaaaggcagtttatcacacatgtattttcccagcctgctttttagtgaaggtgacagtggtgaagaggtagcctactgggaggaagagaaggaggaagcattataagccacagagtgaagaaatacttcctgctcacaaagaaagtgctcgctgtgagaaggagcagttcagcggggccttcaggagtcacatgaagacttctgtcttggtcatgctaccagcccctctggtggctacacagcccgaacagatctttggcttccagaattcacaggaattctggaggttcagacctatcccaaggccctgtggacaggcctacccctaacatttgcaggacacagggcaagaatacaaatggaggcaccagccctcagctgggccctgtctttcctcccagcctcacttatgtcctgctctgctaggagcctgatgtgcatgtgtgtggccactgcatgctacgtcccctgccttcccctccccaagtcttctttgggccttctccaggcctagcattatgctgtgctgtcacttttaagaggacagacctagaaaggggcccatgcaggtcctggaagtgggctcagagctgctcaggcagggaattctaggatccttgatcacctagcaagtctggaaagggggcatggatgtgggtgtacatgtctccttgaacctatggactcctcacccaagggagaagtgaggccagaggagggccaaagggggctcttttaaattaaagccagatgtaagggtggggctgctcctgaggatcaagcacagggtcctggtacacagttggcacttaatcatacctttgactgttgtgtgacagagggacaaaggctgagcaatttcagaattgctgtggaatatctaagtattgctcttcttccacctccatgctccataaacatcgacctagcagcatggcaaaggttggagtggctgggatttcataagatggcagatgagtaacattcccaaccttgtgtactagcaggaagagcaatttactgagaaacagcttcactgggcagggaagagaaacaatccaaggctttccctctccccaaacaagaggacatcactggggctcagatgggtggcgtctcttggtatatttttagaatccatgtaggtttagtgtctttcgtatgtatattccagggagtagctggtatatttgaagctgaatatcatatgacccttccgttcacttttttttcagaacatttctttcctttagagcaacctaaagacatctatatttaaatttcatgaacatgaataacatcgaggaactctgaatcccctcacacagcacccagagctgctgctggaaggtggggatgggagtgaagggggtcagagtggtcacttcaactccaagtccacctcaatcactgtctcatctccagggttctcctccacaaaatgtggacgtgtgattcacagtagcactttggccaagtatattttttggcggattttttttttttttgagatggagtctctctctgtcgcccaggctggagtacagtgacgcgatctcagctcactgcaacctccgccttccgggttcaagcgattctcctgcctcagcatcctgagtagctgggatcacagatgcgcaccaccacgcccagctaattttgtatttttagtagagacggtttcaccatgttggtcaggctggtctcgtactcctgacctggtgatctgcctgccttggcctcccaaagtgctgggattacaggcatgagccaccacacccagccaggtggaattttttaaaataaaatatccaataagtcttacagaaagcattttaaaaagaaggcttaggaacacattgaccccaaatgaagatcaatagagcagaatcagaagatcacattgccacatgtttgatcccccagggaaaaggagctgataatgtgcctggtgtggtgtcgagctaggaaatcctgtgtatgttagcacagtatcgtctcacattcacaccagctgattttcactaataggcagagagatgacgtgaaaattgtgtaaatgcatattgacagaaatttaaggatactcctttgaaagaatgtgtatttgaaaagtctggaaatttttatttttaaataatatgttacattttcaaacaatatgcccaagactttttctgccagacatctttgcaagtgaagtatctgtaaattcagtcatagatttaatcattaatcaaaaaaattgaataaatgaaatttattctctaatgttccaggcaccgcagatatcctgtatgagccatgctctctctctctctgtccttctctctctctgtgtccctgtctctctctctcactctctgtgtgtgtctctctctgtctctttctctttgtccctctctctgtctcagtcattctgtgtttgtctttgtctatctctctgtctctgtcaccccctatctatttaaaatcggggtgttttacatttttttctttaagaggattcttgcattagacagggctagacagaaaagactagcctttttccagtatgaggtcttacgatttattttctcttggtgagtagttagcaagggctggtgatcactgacagagggagcagctgccctggccagagagatgaatgacccatccccatttgctcaaggtagaaaacagtaactattccaacaggtgcctaatcccccagcccaatgccattggcccttggccagagatattgctctaacttttcttgtgatttcggagtctgagaagaaagcagttgagactatatttggggatgtttttctgcactcctgcaccatttccctgcctctcctgtaaacgctcacacccactgcaccccaccctcctccaagaactaggatctttgtcatcttgttcttttccaaggggtgctttatcttgcgggggctgtaggctgtacaacaggaaaccctgcctgcaaacattacataagaaacacattttaaaatattaaaatttggagcttgcttcatcagtgtaccttagtaaccccaaatcctttcctaaaagtgacccagcttcctctttatctgtgggcaacagagagatgttccaaattccttcttgatcaaggtcctactctttttcataaaatgattcctttggtggcactgcccaagcaagtttcatgaggtaagaaatcctgctgtcactgaggaaatcaccccgcaaaagacactatccctcagaaaagccactcccccaccaacacttggtcagagtgacctaaaccctgatcagggtattgtaggaaatgagggactgctggctggccatcgtaccacttggaggcacagtgccatcaatgaggaaatgtaaatagtgactgcagtgtcaatgccaacagtatatagggcacttgccatgtgccaggcattacattaggtaactgagacacatgatgtactttatttaatcctgatctagaacttacaaaataaacataaaatgttgtgtctatttttacagactgacttgtcctagatccgttagctattcagtgacaggactgaccttcaaactgggcttcctgactccagagccacagttctaagctttcaggctctgtgaggaattcagggcttagaaaacatcgcttaccctaagccatgtagttggaaagtggtgaaagtggcattcagattcccaaactccttttattagcaggtcgctaggtcctgggttctcacatgtcttgtcctggaaatcctactcttgtttgctgaggttgggagggagatctgggcattctcccaggtgaggcccatctttggaaagcttggaaccacctgacattgcaacacagcctctccaggacctgtccctgggtattttacttagcacagttggtacccattatgtgggctttccttactgaaagacagctgtgaaaccagttatctatatccagtagtgagagagatgagaacacaatgggggaggaggctatgaagccacaggaggttctcccatttctctctctggggaatcttttaacttagtatttaattttattgtttaaaccagcctgacatctgattctttcctgtacccagtaggtgacgataataagatgaggttactgtataacgcttacccagcacattacagtgttcaagtatgtctgtatacctaatctcccttagtcccacgacaggtctttgtggtaggtggaattaaccccatttaacaggccagtaaacaaagattcagagatattgagttgcctgagatcactcagctattaagtgacaggactggcccttaaactgggtttcctgactgcagagccactgttctctcgaaagtttttaggcaagacttacagctgcttgtggtatatgaagtgctgcattcactcattttggtttgttatttttattgtgtccatcaattgccagcttgcaatctgtataatggccttacccacccctttctaaccggatgagttgatgggaagccagtgcagcacccttgagtggcacacaggaggtctttgcagacactaaggcaatcctttagtctctcaaatgggaaaactgagacagaaccaggtgactaaccttaggccctttgtgacttactggcagcaggttcccaactcctttgctctgccctggaccagtcacttgtgcccgacactaataacagggtaatttgtgagaaatgatgtgtgactcaccaggcgagggaggagagttcgcgaagatggccagtgaagaggagcaagatgtttatcagcaattggaaaggaaatgctgacagatgctccttggattaacatttctcagttttgcaacaccattgcctacttacccagccaccagcttacattttacattcctaaagtgaacaaccaaaaggtggggaggggagttctgcctttgaaaacagaactatcaatctcatagtgttcctccccatcaccttggacccctttttttgaaccctaagatttacattcttctaagacctatctgttctgtgactttgctttacacccctctgacttcagtcatacctgtttttctgcaaatttctatccacattactattctaagtcaacttcctgcctcacttacctccctgggtcctgagtgggcctttggcaatctctgtcaaggtaatgatcaggccaagataagcccaagcggattaaggtgaaggggccttgggagaattccattttggtgagcactgcctcctggaaagccatgtgctattgtgtctttattacctccacactgtaaagtcattttacaggtagatttcaagagcctgtcttcctactgactaagggagtacactttgtattttctctgaaattgttaaaatccaaaagattccaatagttagctgtttgtgtgagtaaaatggctgtgataagtttttatgtaggtaacaaacttgccttacttcaaatcagtttaatccacatattatctgtgtcaagccattagcttttgtatatgaaacatttactataaaaattagcctcttaaaaatattaatgtgaaacaaattaccatttagacaggggaagctaggtgtgtattggaaaaacactggctttcctgggtttactcagatacagcaattttatttccctgggactcagtttcttcatatctatagcgctgggctagatgttgcatgatttttagaataaaatttgctttcactgatttgaataatcaaataagaaaagagtgataagttttcctaatgttgaatcagtgataacaatattttaaaagtttaagccacccagaacttatcatgttagtatatcaattattttttatgtttctttctagtttttttatacccacacacatacatgtgatatgtataaaatagtatcatataatgagatcatatttatcatataatcatagtatgatgtaactttgaatttggattttactttttaatatgtcattaggatttctcatgttgataaattttataatttctaacattagctggatattattatctggagttaatatttcaaatgtgcttaaacattctggtctttaaaaaactaatattactaacattgaagtgttatttattaactgtagctttcaaaaattgtgtccagttttatgttttatgtatattcccaggtacacttgaacattttagtgactcctaaaatttattatctagtttccaaaaggatagtatcatttgtgttgccatcagtaacagatgcatgtagtagttttactatatcgtagttagcactgaatattatttttaaataacttcttctaacttaataagtgtcaattaaagaattttaggacctggaagtttatttagttcccttccttagaagggcaatttcatggtatttaatagtttgactccaatttatcatttaacagacatgaaataaagcgatttacaagcatttacccacttactcattctaacaaccctgcagggaggtacaatgatcaactccatcttgtagatggggaaactgaggtcatgctagttgtccatgggcacatggctagttaagtgtcaaaactaggctttagacctgaggagcctggctccaaagtccatgtgcttgaccgctgtggtatatgtattgagcacttactatttgtacacttactgtatgccaggttatggaaccttgggggatctggggctctggaaagactagatgaggatcttatagatgcttaaatggagacttgaggtgaaggggtgagcagagcattctaggcagaaggaatggcctatgcacatgccacaaggctaaaaaaagaactttgacagtaattccagcactttggaaagctgaggtggaaggattgcttgagcccaggagtttgagaccagcctgggcaatatagtaagacctcatcactactaaaaatgaaaaactagctgggtgtggtagtgcatgcctgtggtcccagctacttaggaggctgaggtgggaggattgcttgaacccagaaagtcaaggcttcagtgagccatgatcatgccactaaactccagcctgggtgacagagcaagatcttatctcaaaaaaaaaaaaaaagaaaagaaaacaagaactttgccttttgctttcaaagattagaaagcagacccctcacagttgcagtatcacagactgaggggaagaggggcacagaagaactggaaaagtaggcaggggtccaaccgccccgggccctcctgcaagcatctcagttacaggagagtgcagggagagggaagacagggagctgcctccagacagaggtggactcattttggagaaaaagcctctgacacaaccttccccaagtggagtttcttctgcatacaacaggagacagcagtagccgcctggagcatttctaagaattaattcattgggtcaagatttaggttaggaaggggctgatagatggcaacctagatcacagtatattgtggagttttattacagagccaagagaaacacatcttgaagggaagaccatgaggggagagctctggctcgaaagggaacttgaccctttcagatgccaaatgtctaattggcatttttgaggtttattagttttgctaggaaaatatcccaattatgtttagtaacagtgagaaagtattgccctagtggaaagtgacagctggctcatggagacattaaattttggaatcagtgggagcaaaagggcagaatcacatcttcctgaaacctcaagtcatcacctaatttataagcacaataaagtaaagcaaactctaccaacagtgttaggagggaaaatgagggggctctcccttctcatttggacttccgaggccttttttgacttgctcagaataccctcagcctttgatatctagtattagagtaaagcacataaagatggttggacttttccatcaaggcacactgcatccagtcaggattagagtaatgggagattggctagtaacaactctgacgaatataggactagcaggtataagaagcagtcacacctctgggatattgagcacccaaggaagaggctccccacaggctgacatgcagaccctcttgaaaggagtctttatggtaccagcggaacttgctggaaaccagccctctggaacttgccataaatctgccctgtagggttctgggagagctgctcattagcaggtatctccctggaggcacgctgccacaacacccccaagggaggtgctgaaatctgctggcagctgggggttgctggagcccttcactgtgtgccccagatctcaaaagcaaaaccctttcctcccaccatgttgctacatgaccctcttctgacaaagcttcctgaccagctggcaaagggaaaatatgtaaagggattggatccattttccccaagcaggcaaaaaggatgaatttggagttgagaggcattaacttgacaactggcccaagcttcaagaaagaagccctgtaagaagagcaaagactcatgatgctcctctccagggcatgtaacagagcattaatggaaacccaggctcccagtggacttacgatgctcctctctagggcatgtaacagagcattaatggaaacccaggctcccaatggacttacgatgctcctctccagggcatgtaacagaacattaatggaagcccaggctcccagtggacttacgatgctcctctctagggcatgtaacagaacattaatggaagcccaggctcccaatggacttatgatgctcctctctagggcatgtaacagaacattaatggaagcccaggctcccagtggacttatgatgctcctctccagggcatgtaacagaacattaatggaaaccaggctcccagtggacttacgatgctcctctccagggcatgtaacagaacattaatggaaatcaggctcccagtggacttacgatgctcctctccagggcatgtaacagaacattaatggaaacccaggctcccaatggacttacgatgctcctctctagggcatgtaacagagcattaatggaagcccaggctcccaatggacttacgatgctcctctccagggcatgtaacagactgttaatggaaacccaggctcccaatggacttatgatgctcctctctagggcatgtaacagactgttaatggaaacccaggctcccaatggacttatgatggaaaaagtccctggattatttttttaaattgagttatagaagttctttatatattctagataaaagttctttgtgttgcagatattttctcccagtctgtagtgtggcttttttattctcttaatgtttctttttttgttctttgagatggagtcttgctctgtcacgcagcctggagtgcattggtgtaatcttggctcactacaacctccgcctccagggttcaagaaattctcctgcctcagcctcccaagtagctgggattacaggcaccttccaccacgcccgggtaatttttgtatttttagtggagatgcagtttcaccatgttggtcagcctggtcctcaaactcctgacctcagatgatccactcaactcagcctcccaaagtgctgggattagaggcgtgagttaccgtgcccgaccttaatggtatcttttgatgagcagaagtctccatgttttacagtctacctggaaataatacaaaccatagctcttgtttacttatcttttccattattttctctgtattattagagtcacagtctcacctgttgtaacaaatagaactcaaaattcaatgactaagatagaaattcatttctcttgcatgtaacagtacagacatgaatggcccagggctaatgagttaattggctttaaaaatcgctcctgtcctgtcagccacatctccagctatcaggaaggcagagagaaaccaggacatgcagcttggtctttagggagattatgcaaatcaattccacccctatgtcattgacccaggcatagtcacacatgccacatctggggaggctggagaatgctgcctcatggagcgggcagccacataccaggtgtaactggggtggaggctgggggtgtgtaactaaaaagaataaatggatacttgggagcatcctgatatcacttaatgacatctttgaagtgataccatatttttgtcacaaatattctgaatttttctttttttttgaaactctattatgaatttcttccaggctttaaattaatataattgttaaattttgtataggagaattccttaaaattattttttgtcttgtagtaagttaattgctcctcttcattacagtataggatatttttcttttttttctctctcttcagtttttttacagttatagcctaaggcattcatagttttgttaatgcactaacttagaaacagtaaatatccttcaaggttaagttgttctatcatttgcattgtcttcttcatgtgaaatggtacaattttaaatgcatttagaattggaatttaccatgggcttggtcttaacactgtgcacaggaggtgcgtagctgctaatgttttcctttgtgttttatcttaaagacatactatttttttttttttggctgggtttgtagagctggttccaaagaaagcacaaacagactaatgtagataaacatgtttacccgaccctttaaccaaattttaagaattgtttgacaactaataaaaatgaagttgtttttagataattaaatcagattttattattggctgaagcatcactctttgagtgttcaaaaatgcattctagccccagtaagctttacatccattcattcaataaatattcatttggtgtctactgtgtggccagctctgagtaggcaatagcgagcaagacagagaaggtccttttgttacagagctgactttcccttcaccagagaatgccggtcacctataacctagctggtcacctgaccttcaaaagctcttgccaactcatatcctccaaccataataatgttcagagatcgcgaatgtgaactcaagcgcatccttgcactttgtcagtcagaaaaatacctttacttcagtttgacttgtttgcccaccttgccatttcttgttcctgctgtctgtctgagagaaaccttctgttctgtagagatagtttcttgttgctctcctctatctgagagatatgttctgtagcaatatcttctaaactggtatggaatttacagtatgaattggatgaataattaccagatgttgtccaaagcctcagcttggattggagttcttacatcagcaaaagttagactgtcatattttttaatactttacaaaaatgttgcttcaaatagtgataaacttgtggcccaactggttttattccttccatcctaagttcgaatggaatggcgtccatctgaggaagtagctcaacaggcttcatttacacattgggttctatacccacgaggttagaaaagaatgaccgtgaaccccctacattagctacattgtcttcttggaaacttttggcagctgaagtcaaaaatagggcttaagaattccatagtattagcaaaaaacacagctggggctgagatgcctcatccgttactattgcttcccccaaagtacaaagaaataaacgcaggcatttttcttgcaaatatttcatattttaaaaaatagcctcagatttttttatgtaaataaaatcacaatttcttctgatatttttacatgagtaaaaattgcagaacttagagaatgcacacaggatgagaaaaaggggccttgagtagctgaagagagaaaaaggaactgagaatgacccgggggtaaataagtacatttgcttccaagagaattccaagcagagatactgaggagctgttaacagagtttatttttaaattgccagaaattgctagaattgggtcaaatgactaaagatgggacatgaactaagaacttaatgtgggcatcagtgggctcctgagactgaccgaaaagtgagtgagtcaaaatcaaggtccttaaaggacagaatcattgctgtgaaggctcaagaatttttcacagcagtgacatgtggggttttaaaaacacaggtatctctccatctcgatgttttgtaactgtcctttccatctgagtattgttgaagtattgcgatgcttacacagttaacccagcacaaaagtattgttctactgacagtataggtgatatgttttttttcatctaccaagcatctttttaaggctattcagggaagccagcagcctcctttacacggaaaaaaaccaccttaagcagtaactaagagtgtcattatcacatttccaacaggaagaacaggggcaaaaatgggagagaaagaagaaaaagagacaaatgagcaaatgagtgcccactgtcagcaagatgaggtcagaggctaaacggggagaaactgacaaatgctgcaggctgtgtacttctcagttataaatcctaaaaacaggtacctctgctacacttacggttcagacaaccaaattggagtcatcagtttctctaaaggagggtgtggaagatgctggatgtataagttggggttcttggttgtaggcaatagaatctacctctttcttagtaccttaaataaaatacttcattggaggcaactcacatcattgaaggaaggctgatggactagacttggatgacagtggaaaccaaggcaatcaggaaagccaagaagctgagagaccgcgactatcttttcctcagcagcagtcacggccgccgctgcctcggcaggatgccatctgctgctgctgctggatagcattgtctgctccagattcaatcccaacaaaagcatctgaatgaccagatctaaggtcaggccaatgccagcagatggagaatggccccctttggcattcacaatgggaaaggcatcgtaccaacttcacacctggtggcaattttcactgactactatgtgggctggatgctgagctggtggcatgtccaaaatgacatgtccagtacactaggatcaggtaaatgtgactctgaaagatcccagaggttctggctgtggattatcacaggctgtggcctgagagcagccatggtgaggccatgagaatgtcacttgtttgttgctaacagtctgaagtagcagagaggattagagaagagtgactgtcacagtcttcacttcctttgtgtgtttagcctctgatctcatcttgagaaaagatgaggctggctggaggggtagcctggaccattaaagcccatgcctagagctgaaatattggcttatggagtctatgaccacccttatcttcaaggggccatcatctgggagagacacttcttcaggagagttcaattttgctttttaaagcatactgtttttttcttccataaagtcataaaatttaaagtcatgctgaactctgaacctggttatagtctttatttcttttatttatttttcggggttcgtggatgcaagcttgactcaggagaatttgggaggtaaaacttaagcaccataaatgaagaacaggcagctgcagcatgaaattcaggataagccatagattaaaaggtgtaaaggttaaaagttgatgaagctgagaaggaggcttcttaacttttttatttttttggaggtataatttacataccatgcaattcacccatttaacgtgtgcaaaatgcaatattttttagtatatttacagaattgtgcaaccaacaccacattcaaatgttaaacattttcaccaccttaaaaagaaaccctgtacccatcagaagccatttctcattttccctcgtctgtccccacttctgctttacctcactgaggagctactaacctaatttatatctctggacatttcacgtaaatggaatcatacaatatgtggccttctgtgtctggccacttagcatcatcttttcaagagtcatccatactgagcatgaatcttttctattttcttcagtacatgcctaggagtagaattacaaagtcttatgggaactgtgtatttaaccatttgagaaaccaacagcctgttttccatggcagtggcaccttgtcacattcccatcaacaatgtctggtgtgtgtgtgtgtggggcggcgggggggtcccgatttcttcacaccccgtcagcacttgtgatctgttggatggcagctatgggtgtgaagggcctctctgggtatgggtgtgacttccatttctctcatggctgaggcagagcatcttttcatgtgcttattggccatttctatattgtctttgataaaatgtctattcagatcctttgctcatttttaaactggattattcgtcattttttttcattgagttgtcagtgtcctttacatattctaaccacaagtcccttctcagatatatgaccttcaagtatttttttccattctgtgggtcatcattgatggtatccatttgtctattctttcttttgttgtttgtgctttttggttgttgattgtttgtttgtttgtttgttttgaaacagggtctctcagacccgatggctcacaaagacaccccataggctcacagaggagctggctaccaaattctgtcactcaggctggagtgcagtggccccattttggctcactgaaacctctgcctctgggctcaagcaatcctcccacctcagtatcctgagtaactgagattacaggcgcatgccaccatgccccatgcctagctaattcttgtattttttgtagagatgggatctcactatgttgtccaagctggtcttgaattcctgggctcaggcgatccgcccaccccagcatcccagggtcctggatgtataggtgtgagccatcacacccagcctgcttgtgcttttgatatataacaaggctttgcctaactcgaggtcacaaagatttactcctatattttcttctaagagttttacaattttagccattatatttagatctgtgctttgttttcatttttgagtatgatgtgaagaatgggttcttaatacttctgaagctgcaataattgatgtttggtggcagtacatgaagaaagagtgaagaatgtagatttattgtctttctcagtttggactacattttccaagaggtcatcctcaactcttgagttctttccatcttccctaaaatttttggctgttgagtattaaagtttctatggctttcaacagatcttaatccattgcttacatgtaatgcacaaggaattgtttagagtggtaacccctacataaccatgataaactatttgattcgttatatttcacatgatacaaaataatctgtactgccttgagttgtgttttacaggtgagcaagctattttgtataacagtgattataataatattgggggggaaacctaactcagtgtcattgctatgtgttccctgagtccttatctattaaatttggaaccaataaagtaaggaacatgctgaggcaaacttctaggaaaaaaatatctttgcccttgcaggagtatctagttgtgatgcagttgaggaacacagacctggcacaagctttgtccattacagagagcctctgtggcctcgactggtttctcaagtctgtaggaagtttgaacttttgctggagtttgactcaaaggcttgtgtatgctcttgttctgagatgttctgggcaagtacttcaaaatagatttctctaaattccccttttggtcagttatgtcagatggttcaggcaaccaagcttgagtcctcacttattttaccaaactaaccatgaaagttgatcaattcttccttcctaacagctctgtcaacagctcttactgcacctttgtacccagatcaagtctgcagtccgtggtcaccccttcacccctgtcctttctgtgtccccgaagcctaatcaagaggaagtatcactaagtctttgttgattatctttgttccaccatatttacacaacttcgcaatggtataaataggattcactcctccctctcagggtagaaattctaataaaagaatagtccattgaggctgggcgcagtgcttatgcctgtcatcccagcactttgggaggctgaggcgggcggatcacctgaggttgggagttcaagaccagactgaccaacatggagaaaccctgtctctactaaaaatacgaaattagctggccatggtggcatatgtctgtaatcccagctacttgggaggctgaggcaggagaattgcttgaacccagaaggcagaggtttcagtgagccgagatcacgccattgcactccagcctgggcaacaggagcgaaactccatctcaaaaaaaaaaaaaaaaaaaaagaatagtccaaggaaaaggcagcctttctccaggggcacagccttgcaggtgtggaggcgactgggttagcacttctccgaatggtgggtaagaagtgagatgaggtacggaattatctcaccagggttcaattcttggttttggtgtggatctttctgaaggacattggggtccacactgtggaattctttctcatctgaagtcagaaatctgtcacttcagtattcccctcttgtatcctaccctctgatctagtcttcccattaccctcgggcctcactcccaacacacatgtctttgaccttcactcccttgagttttctttcttccccatcaatctcacttctctctggggctcactttatcctctacccgatttgcatcccacagatggcgttattccctctggtccccactgctctggccaaaccttctctctgctgactgcatctattgctgtgagctgattgtcctctagtttctccatctcctgaggcatgcttcacaccactgccagaagagctgccaggcatgtgcccgggtgaagcaaagtggggagggggcttgaaatccagtcctcattccactgatcattttgggcttggtagagctgtgtctgcctagagagaataccttcctctaatcagcacaaagacaccctatgggctcacagaggagctggctaccaaattgacctttctaaaatagctgaccatctcattcctcttcataatacccttcagtgggtcctatcagctaaatgccaaactccttagcatggaatgcaagcaaacgctctaaggcctagcctgcttgtcccaccagcattttaatgagggtgatcatatgatttattgtccaaagtattcctttcagaatacttctgaaaggaaggaagagctgttactgattatgccagggcaatccactgcagtgcctgggcacttatttgtaacctaccattccacaccttggattcattcactgtggtagtaccaacccactggtagttttctatgtgcgccttgttatttcccgattaagaggttttgacagagtgattttgacaaccttgttgtgaatctgaggacattttgattcctttttctgattaaacattaaaagatgaaattcatgcatcctcaagtcaaaatcccaagtccaaaatgatcacagcctaaacaatgatattaaaacatctaatttacattattctatgctctggttacttgattgtagtctgaatactttgtctgcttagaacttgtattccttcttccccattttcctgcctttcctggcttatgtccacttattgttcaagatatctcaaggactttttcttccagttacctttccctgatatttcctggttgggctcagtgcccatcatcttgttcccacagcaacctgtatacgttttttagcatacctaaaaaaaaaaatgtgttgaagtcatgagttcaggcctgccttgcttacgagactattatgtcctcaaggcaggaagcctgtcttattaattgttttatcctcagtgctcagcacggctcttcacaaataacagaatcttaataaatattcctttacatagactaatttgatctccttgtaatatgaagtgaaacgtgcctgccccttatttcctggggaattttttagggtactagtgatgatttgtacctacctggagccttcaggacattgacttttggcatgttaaagttgtaaagcctattgttatttttttataccatagaatcatacacaaagaaaatacacgtgcataatattcacatatgttttgccaaaagtgtgaatagtgatgtgttaaacttgagtttttccataaacaaaattgtcctgagggtatggaagagtaattcctgtttaatgcaatgaaggatcatataatccattaaataatagtattccattcttgccttattttctttctttctttctttctttttttttttttttttttctttttttgaggtggagtcttgctctgtcgccaggctggagtacagtggcgtgatcttggctcactgcaaactccgcctcctgggatcaagctattctcctgccacagcctcccaagttgctgggactacaggtgtgcaccaccacacctgaccaatttttgtatttttagtagagatgggatttcaccatgttggccaggatggacttgatctcttgacctcatgatccgcccgccttggtctcccaaagtgctgatattgcaggtgtgagccactgcgctaggcctcttgccttattttctaagctctctggatctggcattttgagccaaggtgatcaatgttatcctaaagttacgtgtttgttttacaagcctaatgtctgtttccatttctctagaatgttttggacgtttaaagaatggttctggttggaaagattctggcttcctccaacaataaagtggtcagatcttgaggatcacgatggactcgtctttgtaaaaccttctcatttatacgtgacaattccatatgcttttctcttgctgattatcagacgtgtatttgaaaagtaagtagtacttgtgtctttccttcccattccccctctttgctctaacactagaataatacagtcttaggcttagtgagatccttaaagaatctgttgttcagaggttgccactaatgggccacagattctggggatgagttaatgtaatcagatgcgctccaaatgttatttaaaggctgaacaacaaaaaattagaaacatggatcccactgagtgctttagttttataacgaagaaaatcaagatcaagagaggttgcggaccacagagcttattggtatcaatgacaatacgggaacccagttcatctactcttccacggtgtctgacaatgcatgtgcattcccagaaaggctgtgctagaagagtctatgactcaggaagcattagcatcctcaagtgcctataaaataacaaaaatggctcattaaagtctaaaccaaatattgctatatagtatagcttattttaaaggtttatttaaaggtttaatagctgcccttcgttctaaagtgcaaggaaatcaaagagaaaaactatcagtttgctttctcagaaaaagtaaacttatttttttcttgatttaatttaaatggatattatttccagcctttttattaaaattgtactagtgttatgataacagtagataaatgttcatctataatctctgttgttgactctatttcaaaaagctgttattagcacattaatttatttggagcaaagagaatattcaaatgtcaagagttggaaaaacttgagacaaaatctgatagagatcattttgtccaagactaactgtaatgcagatcatatgtttataaacatttgcagggtccttatcttgagagctagtttgaccaactctgtttcatgaactcttgaaaaagtttttgtacaaacaacaacttcactggggccaacagcgtgctattcctattgggaggaaaagaaagcccctggaaaccactaaaccctggctgagagcatttgaaaatgtacttcttttctgacagttaattctactttttactcacgtatttggatatgtcaagaatgcataaataaagtagaagaattactatcctgaaatactaggtgtttttgcattgtatccggtgatctttgaatttggcatccaggtccattacttatttccattgcagatttcctactttttggtggacagctccatttttcacagtttggccaggactgtgagccagaaacatctttaggttgccaaagaagcacagctgtggaggaccagcttgttacgtccctgtcttggcctctccaacaacaatcaggaaggaatccaaccctctcttaattcctaggaccattgttgcttcttctcaagggattaagtatagtctatattctctattctatctccttataacttcagctcccaataactcactctcagccttttccattgtgacgctgcagaaaactatgtgttgcttcactaatgccatatctcttttaatgccatagaaggaaggaaaatttaacagggagagaggtcatactttttgaagtataagtttatgtttttttccagggcttctatatcattagtgggagattgaaccacttatatcataaataaaatatcacttataccttatatttgaataggagtttatagtttaagagctacataaaatcacaaatggtgtggtctcagtctgcaggtgtggaaatgagaggtaaatgacctggccaaggtcacacagttaacatgtaaggggatggatctgggactcgaacccatgagctcaggtttagggttgttggttttttattttctgactgtttcagtaattcttagactttcacagcgaaagactcctgatggcagaagagagtacacaaatgtctcttgggaatacagaaagcaagcttaaagagataacagcaaacataaaaatgtctgaactattttaaaaattcatgtaaatataaccctatgtttcagcatatcctgatatatttaacacaacaaagcttccttcttttgttctagactgcatttatgtacatcttctcattctatgaagtgaccaagagttgtgatttggctggttcattattgtcctttagtactagccaagaactatttaagatcagaaattaatgtttcttcctagaaaatcaagaagagagagacagacagatgagaaacaaagaagcagataatttgaaagtaactgacatttactttgtatttaagattttctttccttgaaagttatagtttgtgtcttatgttttgttttttgtttttgtgtgtgtgtgtggctaatgttttgatttttattttgtccagactactagtttctaattagtttatcttctgtgcattcttttatgtgtctgaagtgtgatttaaaagaaacctaacctgctcaaatgtcaacactcatggaataaacacattgtctcagagtaaatcatggtcccagaagagtccaaggcaggggtgcaggtggtaaaatcagaaggacacatttttattattgttgttacttaattatacacgagtagattctccaccccagcaacataaggtcatgatggggcagtatgtccatcgttctttaaagaagggtagggtagctggagtaacctatctgtagcgacttacataaattgaagaagtattgttactaactgtcccaaatggaaatagtcttaaaatatgcacattagactttttcatctgagatctactttgctcgcaatattttgttcacacataaaaacaaaaaacacaacaaagcaaaacctctggaaagctctgctcacagagcctctgaatccttaggaactgggaatcaatcttatgccaataggctagtgtatctatttaggagaagtatttaaatgtaacatgcctaatatctgcctagggatacattccttttattccattaaaatattaaaaataaagggagatatgggatgtctaggcttttggttcccaggtaactgatggggtgctagacaaagggggggccgtctgggtgtctgaatgggtttgtctgaaggctcagttctgcaatagtagcaaacctaagggactcattccctggtaattaacctaactttgaaccatttacatgggagcagatgttcattcttttttcttcctctcagactttttttttctattccatatcaataaaatgaaaatttaggcaagctagctggcaagctaatctctaagtttctttctagggctaagacttacaatttcccttatctcttcagttcaatttatcaactatttattgtgcttctttcttctctccttcttcaaaatagatttttaattaagtgactttatattcatctacactttattaggtgattgatttcctagatttatttgaaagggaaggatagcactcaattagacaactacatttatatctatactctgttctgttaacaatgttattttttggccgggcgcggtggctcatgcctgtaattccagcactttgggaggctgaggcaggcagatcacgagatcaggcgatcgagaccatcctggccaacatagtgaaaccccgtctgtactaaaaatacaaaaaaattaactgggtgtgttggcacatgcctgtagtcccagctcttcgtgaggctgaggcaggagaatcgcttgaacccaggaggcagaagttgcagtgagccgagatcacgccactgcactccagcctggcgacagagtgagactccatctcaaaaaaaaaaaaaaaagtgtgtgtgtgtgtgtgtgtgtgtgtgtgtgtgtgtgtgtgtgtaagagataggtatccagtaaaacaaaaatcattaagtctgtccttgaagttaacaaagaggactgtagttctctttcttgtttaaattaatgattttaacaggtatttattcctcatatcagcaaggatgctatgaatgtgtatatttatctatgtgtatacttacccatatgctatttctcacatgaccctctagagaagaatgttatgcttcatttggctttgagattagttttgtttccttactgtataaatctttggtttaattctattttgctttcccctcctaatttcttcatttctagcacttgaggagatagcactgagcagatatattgaaaacactaccctatgaaactatttccagtttgtgttgttctaatagagaaaaaaaatggatgttttctccactaaaattttccagctactaggttggataaatgaactaattcaattatttatccaaaaccctgtcatatatatatgtatttttctctctatatatatatatacatacacacacacacacacacacacacacacacatacatatatgctctctctctctgtgtgtgtctctctgtctctctctctatatatatgtctatataagagcaatcttgagtgatggatgactttttcattaattcctttttttccccatgcactactcccattcccctctctgtcgtgttctgtgtatttggtgatcctttatttgtatgacccagtaaaacatgtgcttcatgtacaggtatcacttgttgacacaaatggtattgcactaagaccttttctttcttcttttttaaaatttagcactatgttttatgatctctccacattgctctgtgtacatctggggcataactcacttatttttatatgtctctgaaatttaggggccattttcaagagaacttaattcatctggaagttggactgacatacatttaatcagattatcttaggagagtttttattcaacttccatcgatataaaaatgaatttaagaactaaatgatcattcataactaaaattgtcagcatttaattcaacacaaaaattcttcttaagtaagtcctagaattgactggactggcagaagatagtacctttgtcagaactgaaggaagaataaggaaatctcattattttaaaaatatctgctttattgaggtttgatttacatacaataaagttcatccaaaatttgatgcattttgacaaatgtatacagtcttgcaagcatcaccacgattatgatacagatttctgtcagctaaaaaattctcttgtaatgctttcagttaataccctcgctacccactagccaccagcaatcactaatctattttctgtcactataattttgtattttctaatatttcctttaagtgaaatcatatagattatggtcttttgtgttcgacttctttcattaagcttaatgcttttaagatttttttcatgttatgtatatcagtggttcctttctattgctgaatagtctttcaacatacatatatactataacttgtttatcctttagttgatgggaagaaatttgtgttgcatacagttttaggctgttatgaatgaagttactatgaacaatttgagtacaagaatttgtgcagatatatgcttttatttctcttggcaaagagctaaaacatttgctcttcaaggcactgttagtgtatatccctacaatagaatattgttctgcaatgaagaggaatgcactacaaatacatgccgtgacatgagtgagcctcagaaacattcagctctgtgaaagaagccagacacaagtgaccacatattgtataatttcatgtatattaaatattcaaaaaggcaaactagaaaaacagaaaatagatgagtggttgcctggggcaggtgcaagaagaaacagagattaacaatagacatgaatgatggaaatgttctaaggctgattcatagtaatggttgtacaacttagtaaatgtactaagaagtcattttatatattaaaaattgtatacttgaaaatattgaattatatgatatgcaaaataccttactagttatctttttaggaaacattactgtaaataaaataaaaaggcaagccacagactgggagaaattatatgtaaaacatatatctgataaaggacttaaattcagaatatataaataactcagaactcaataataaaaagaaataacttggttttaaaaataggcaaaagatttgagcaaatacttcatcaaataagatatacaaatagaaaacaagcacatggaaagatgctcaacattattagtcattaggaaaatataaattaaaaccacaatgcactggattagcaaaaatgtcagagtaagaacctctgaaaattctttcttccataaaagcaaccagaaaactagcaaaaattgtcacagtcagtttttttcagaattgagaatcagccaaaggcttacagggatgtaggagttgttatttaagaaaaacagcagattcttggaaggaatagcaagctgtgtgacatttttaacttgccctgttcccatcttgccctctccatctctggatagccttgaagaaccaatggcccacaattacagtggaaactagcaacctggctgccactgaaaggagcagaacagagtagaagctccttcaaagctcattatcaggggactgtcactatctgacctgtctgatggttctctggaaggcactactcacaatgctgtctttatctgacctgactcagcgctcacccagtgaaaaagccttttccctgagggtgtttgtctaaaacaattagaggcacttgattaacttcataactgtctaagacagtggataacaattagggcaaacaataaaatgaccaaaaagctttaaaggaaaacctagaacatgagatgtgcattgaaggctttgaaaaactccaacatgttcttggaaatctagaagacctgtgtaagggttaatgcatgttcatggctatctgcatgctcaggaaagacctgggaaggccataagctctcacctctgaatgacctttaggctctgtgcaaacattaagtgaaggctaaggcagagttgcttactgcctagctaaatgttgaaggtgtgctccaacatatgcacagagctcctcaggaaagactgagagacttactggttctaagcatttaaggaaatctctgtctaatcattagctgaccactaagctaacctaataaagccttcagtgctcacacatcacaaagaagactttacagattaattcaaaaaaggtgactaagcctcacgtctgtaatcccagcactttgggaggccaaggcgggtggatcatgaggtcaggagatcgagaccatcctggctaacatggtgaaaccccatctctactaaaaataaaaaaaattagctgggcgtggtggtaggcacctgtagtcccagctactcaggaggctgaggcaggagaatggcatgaacctgggaggtggagcttgcagtgagctgagatcatgccactgcactccagcctgggcgacagtgcaagactccatctcaaaacaaatatatatatatatatatatatatatatatatatatatatatatatatgaaaagaaaaaaggtgactaagcaaacaaatggacaatgacaaatagcaaaaacaacaaactttggggaggagaaataatctgatttttatagttgccaccttatagtatttaacatgtccaattttcaacaaaaacttatgagacatggaaagaaacaaaaaattatgcactatacacaggaaatatagcaattattgcaagtgtttctgagaaagcctagatagtggacttattagaggctttaagtcaactattttaaatatgttcaaagaactggagaaaaacatgcttaagatctaaaggaaagcatgaaaacagtgtctcaccaaatcaagaacatcaataaagtaattgaaactataaattataacaaagaaccaaatagaagttctagggttgaaaactacaatgactgaaatcaaaatttcatgagagaggctcaatagcatatttgagcaggcataagaaagagtcagcagtgtgaggaacagcaaaataaaagagaatgaagaaaaatagtcttagagacttgaataccaacatacacataatgggaattccagaaggagagaagagaataaataggaccccaaaaatgtgaagaaataaatggccgaaaatttccctgaattctgaatctgcatatccaaaaagctaaacaaactcccagtatgatacatttaaagagaactacatctacatatgtcataatcaacttgtcaaaagccaaaaagaaagaatcttgaaggcagcaagagtggaacaactcatcacatacaaggaattctcattatgattaggaatcgatttctcatcagcatctatgtaggccaaaggcggcggaatgacacataaaaagtgctgaaagaaaaacactgtgaaccaaacaaaactctccttcaaaatgaaagagaaattaagacattctcaaataaacaaaaaccaagagaattcattactagtgggcctagcatacaaaaagtttgaaaggaagtccttcagactgaaatgagagtacacaagatagtaactcaaatccacatgaagaaatagcaccagtaaaagtaactacataagaaaataaaatgatagtataagcatattttttgtttttaacactttctcctatctgatttaaaaggcaattgtataaaacaataatctaaatctgtgttgatcagaacacaatttataaagatgtaatttgtgagacaagagcacaaagaaggggacggggaatggagttttttaaccctattgaaattaatttgatattaatctgaagtaagatgttataaattaatatgtcaattataatccccaagtgaatcactaagcaaataacttttaaaatagtaaaaaaccaaaaagacaagaaaattaaaatggtccatcagaaaatatctatttaacacaaaataaggtagtgatggacaaataaacaaaagggcataagatgtatagaaaacaaatagcaaaatggcagacataaatcctattttatcaggaattactttaaatgtaaatggattaaataattaaaggcatagataaaatagttaggaaaacacgatccaactatatgttgtccacaaaagacacctgtttgtttaaagacacaaataggttgaatgtaaaaggatggaaaaagatataccatgcaaacagtaactaaaagaggactggagtagctgtactaatatcagacaaaatgtaatttaatagatttcagaattgttactgcagacaaaggacattttataataataaaagggtaaatctgtccagatgatataacaattgtaaacatatacacacttagcaacagagttccaaaatacgtggagtaaaaactgacagaattaaagggcaatcaggcaagtcaacaataatagttgtaaacttcaatactcactttcaataattgatagaacagctaggcagaagattatcaacagggaaatagaagacttgaacaatattgtaaaccagctagtcgtaacaaacatctatagaacactctactcaacaacaccagaatacacattcttctcacatgcacaaaaaacattctccagcatgattacatattaggctacaaaacaagtctcaataaatgtgaaaggatttagatagaaagtatgttttccaaccacaatgaaataaaattagaaatcaataacagccaggcacagtggctcatgtctgtaatcccaacacttcgggtggctgagacaggaggatcacttaagactaggagttggagaccagcctgggcaacatagcaaaaccctcatctcttaaaaaaaaaaaaagaaatcaataacagaaagaaatcaagaaattaacaaatacatgtaaattagataacatatttctaaataaccaaccagtcagggaagaaatcacaaggtaaatttgcaaatacttgagatgaatgaaaaagaaaatgccatactaaaacttaatagaatacagcaatagcagtgtttgaagggaaacttacagctgcaaacacctatatttaaaatgaagaaagacctcaaatcaataatgtaaagttccaccttaacggactagaaaaataaaatcaatctaaatttaaagcaagtagaagataggaaataataaagattatagtggaaaatcaacaaaaaccactacacacccagtagaattgccaaggctgacagtaccatgtgttggcagggatatgggctaactggaactctgacaaattattggtgggaatgcaatatagtacagtcactttggaaaacaacttgccagttttttataaagttaaatgtataattgccctaccacccgtcaatcctattattacgtatttgccctagagttgtgccattttttcgtatgttagaacttgaaatgggaatgtagtaatttctttaagataataacaccaaataaaacattttctaacaaaattcctatttattttaatccccgggagtctttaaaattctaagtagaacagcttattctaattcctaaatcttatctataaatatgtttggattaacataaaatgcattttagaattgtgcaagtgttttttttttaatcattgcttttttgtatggactgaaacttttctgttttgagagacagattttggctgtacgtagccccagtgtcaacataaacaaatgactgatttcattagaaacctgaagttacagctttaattttctggtgtcatcgtggatttattcttagattttgaactttttttcttttcatatttttgtagatttgttgcttcacctctagcaaaatcatttggcattaaagagacagttcgaaaggttacaccaaatactgtcttagagaattttttcaaacattccacaaggcaaccattgcaagtaagtacaaattctttgcttttcgacttaaaaatcttctttcttaatggttcaattatctatagcttaccttgtgtgtgcaagaaatctattctagttgaccagcaaatgatctggattcacttggatttattgtttctttgttctgttgacaggtttagaacatcccaagtgtgatacatatgataatataaaataacaaatattaacagttgaactattgtatttaactatagtgtagagcactaatgatcagtgccataatttgggaataaaggtcaacatttaatttttaatggtcaaatatatacaaagtatacagatgaagaaatataattgttagggcagagaagcccatatctgacaattttgatgattgtggcatcatcaaaatacattacacacattatgaaaatgttcattggggtcgctttcatgagtaggactgttattttattcaaagcctcaacatactcagaaatatgctgtgccccgactattctccagagacaatttctaagagtcacagttctcttcacaatataaagtttccttcatttatgttgtagtgcactgcatgcttaaatacattcagaaaaagaaaaaagaaaaagtttttaatctaatagttaaaaaaataatgtctaagtaagtctagtgttcactccagttttgttatatttccacagttaaaatgacagatgaaacaaaacttctccaaaagtgatacaacctctatgatgaatacaaacagctatccccagtaattttaaaaatcaagtacatatgctaacacagttctaggataaatagatttctgagggtcctgaactttatttcctgaattaagttgcctctactatgacaattgctctaatttgttcctcgtggtttctctgcacatgaaagcacattgaggtttgaccacctcgcgtgagatatggtgtccagaattgctcatagcaagtgagagctggctctaacttgttctgccctcagctcctgtatttgactgcttttgtaacctaggaatagtctgacaagccatctttatatgttttttattcccatgtgctttaaatgactgccatcattcatctaaatccttttgttaccactggtgataataatacctaagcatccctttatatgtttcaaatgggaaattatttagctgtgtttaaaaaaagatagggctctttctgggtcctttattatccttctttgtttgggaacaactaactttagtaatactttgtataaaatgggaagaacagtgctataataccaattcgttgctatccttgctattgctaagagcttctagtcagcttttcagaatatttaaaattatctagaaaatttggtccttaccaagcttctctgctatggagaaaaaatggccaaaggaaaactaaggatagctgaaaaggtttatagggtggtagtctttctttttcatgattaagatgaggaaacttaaggcccagccaaaggaaaatgagtggtcgttcggctaatgagtggctgaatcaaaagctagaacctggcccatacttccagtccagtgacctttccaccatgctacagtgagttctttatctgtaaatggaatgttaaaaatatattttaaagactggtgctgtgtttatagtaattattctaactcaactgacattacagtatggtttaataaagacagaattttgacatttgcatccagtaagaaggaaaaaaaaagtggctgggcgcagtggcttacgcctgtaatcccagcactttgggagcccaaggtgggtggatcacgaggtctggagatcgagaccatcctggccaacatggtgaaaccctgtctctactaaaaatacaaaaattagctgggcgtggtggcgagtgcctgtaatcccagctacttgggaggctgaggcaggaggacagcttgaaccagggagttggaggttgcagtgagccaagattgcgccaccacagtccagcctggtgacagagtgagactccatctaaaaaaaaaaaaaacagttatatatcacccccgaagtgttagcttcatctattgaaccaaaaaggtgaaggaatataagattcctaaattatattgctctgagattaaaaaactgaggcagtattcgtatagtatatcaagataacaataatttggccagcaaaatgtccatagcctaaaagcactaggacttaggaagatagaatgtaatacaggaggacagagttcatgacttaatagcaattgcagatacagaaacaaactcgtctcaccatacctaccacattaacctggccagtgtcatgcagatagcactttgcttaattatggctgaggtaataagacaagttgctgggtggatgaaaaacagttttgtactgattcaagattagggtattaccactaaaaaaaagtattcaaaacctaaacagtagaatattgcattggtaatatttgtagataacacctgacttgattgaaacaatggagtacacagacccaaggatgcttcttcagcagctataggctgcaccaggaaaacaaaacacttccatgcatatgacatctactgtgggctggttagcacagaagggcataacatggtattgatgaggcctaaaatactatacacatgagcctcagtgagagttttggtctgtgatattgcacagttctcttatgattgtatctatgcaggtgtgtgtctgataacgtgtgtatgtgtgcgtatcaagaacaacttccagatgtttggggtaagaccaacaactctgaccaacagatcaattatagtgctataggtaacgtgtagtaacagtggaacttattatctagccctttccttagcaaaataaaaaataattatatatatatgaactgatgcagagcaagtaagttctggaagagatctgaagaaaacgtggcactgtgagactgaactcaagccagttactacattcaataaaggtattccagtgtgctagcttgagtcattcatagattcaaacatttttagagcaaaaacctcttctagtgctatttattgtacagggaagacatgtgagagccaaagaggtagggtgactcctctactggcacagagggttcccttttcagtccagaggccaggtctcttggccccattcagcactcctcctttaggccattcgacctctccttgaggctgtgtctgagagagacctttcctgcatgttccaacccacttctgaatgttcacagcaataggtagtgtagaggctaaaaatacaaattgtgaggacagaccatgtaaggttagagcctggctctgtcaccgactttctgtgtggagatggacagattaaacttcccatgcctcagtttcctcttctgtgaattgagcataattatattgcttatctcatagggctcttgtgaggatcaaattgagttaatacatataaagtgcttagaatagtgcttggcacatagtagatgctcagtaaaggtcagctattattatttgtaccattaactttgtgcctgtcatgcactgacttccaaaggagcgtgtttaagcatgtcttcctcactcaagggaattgtcactttgtttcttaatcatgcttgtttttgttcccatgacatcttgcactattttctggtcattacagatggtcaataaatgcttcatgtttcacacattaattcaagaaaacacttttagacacttttgtttgcaaggagttttctctcttaataatatcatagtgcatgaggccagtattgacaagactgacttccaactagattcttctgtactccaaaatagaaaaaaaaagcttcgactcataaacagttactgtcttctatatatgtttattaataattcattgggcaattatttgcagaagtcatgggagaataaaattgagttgttctaaggtctgagaatattccagaataaagacaaggactttagtttgttttgctcactactgaatctcccacacctagatggtgcctggcaccagtgcttagagactctttaaatcctttcaaatgaatgaatggcaaaacacttgaaatagtaaagctaggcccagagccccttcggtctgagcacacagagtgtagtgcagcagcatgccagaatatgtcctgctgtgcaccagccaacagaatttgaattgtattctccatgttgggggtctgttcgtgtttgcaaattatgttaaaagtaaaggaatacttttttcttaaatgatttgtagtccatggtttcctttctgtgtttggtcatcaaaatctctagcactgacacggcactcagtagtttcattagcacattctaatcccttggtcctcaaatcatccctcggaggtgggtagcaaacattctcttaatatcccattttccatgggggtcaaagtgcggtgcttacgcctacatagctaggaggtagcagaactggatcttctgttttcagcttcctgcccttcctaccatatccgattgctttgacactgcagtgttctttccttcctgcaagggaacatgtaagataatctagcagaagctatccggctggtcacagacttttgggtattcagccatctggcccacaggcaggctttatttggccctcacaatactcatccacaattggtttaaatttactttgagggattggtcaacatttttaaaaacctagtgatttctcatcaaaatcctgggtctgcacgttttctctggaagcgtccgccagatcttggtcatgcctggccttttgggacatgatgtgtgcttctctgcctgctgtatccatacggctcccacttctttcctcagcactgaagctgaaggtcagttttatgccattttatttttcacaaaatagaattaagaggaaatggaaatgtttcttttatttatttatgtatttatttatttagagatggagtccttctctgtcgcccaggctggagtacagtgtcacaatcttggttcactgcaacctctgcccccaagattccagcaagtctcctgcctcagcctcctgagtagctgggatcacaggagcccaccaccacgcccagctaatttttgtatttttagtagagatggggtttcaccatattggccaggcagatctcgaactcctgaccgccttctcggcctcccaaagtgctgggattacaggcgtgaaccaccacacccagccagaaatatttcttattcttacttgggaaataagaaatcaagagggctggcattttttatgagcatatttctttgtagacgtggagaaggttaccataggtttaaagtacaaaacttgcctatgttaaaatcccactgtgaaacagacctggtccatttggtcatttatgtttcttgtctggcttggggagaccttcgaattggtaacatttgagcagatctatcattcatattgtttccaattttaaatcatagcctacaacttctacttcccaaaagagaagcaatcatcatcatcatattttgcaattgttatttttgttattgaaattattttggattagtttgaaataggctctctatataattaaatgtaaaagtggatggctaacactggttggagtttttcctgcattatcttctggagctgtgagaaagatcatgtgaaataacaaaatgcactagcctaagttctcgtccacactttgcttctaattttaggttttggacaagtcactgaacttcttggggcttcagttccccataggaaaaatgaggagattggattttattggatttgatttaaactatgctactctacctggcgcctgggaagtcctaagcacattttagctgaacaagtgagctcacacatgcaacttgaatgccgggttgctgccagcgtatggagaattgatctttctcagtaacttagagagctgggatagtaacattttgttttttggtatgtgtgcatatatgtgattccataagcaaaagaggtaaattccctggctccaggtctcatgacagaatttctctcatccccagtaccgaagctcttgtaactcaatctccgtctcttgtctgcctgccagtctgactctgttctttatcactcatttatgcgtttcatcccttttcagactgatatttatggactggcaaagaagtgtaacttgacggagcgccaggtggaaagatggtttaggagtcggcggaatcaagagaggccttccaggctgaagaaattccaggaagcttggtaaggaggatgggccaagctttaggaatgctgccgtcctatctggagctgagtggtccttgcagagagaatactgccggagcagcagagggagggttcagacccagctctgtcacccactgatgtggtgttttaggctcctcacatatttgccttctctgcttcctccactcctttataaatcaagtaagctctgaactctatttatcgggcctcccgaaccagaatagattcagacagactcccacactatgaactctctaagatgaacaggagatgttatgtactcagcctgaaacccagaaaaaatcataaaaatgtcttaactggtgtttctcttttcttagggtcagggttggccctaagtcaccagactttatcacctgtatccaaccatcacaactgtaagagcagagaatgtctgcaaggacgtgtgttccctctcagaacactgagaaggcctctctgtgtggcgtggctcatgaccccagccctcctgtagggtgcacagcccatcctcttggtttcccaggatttttagtagaggtggtcaggagatcaagaccatggtgagaccccatctctactaaaaatacaaaaaattagctgggcgtggtggcgggcgcctgtagtcccagctactcgggaggctgaggcaggagaatggcgtgaacctgggaggcggagcttgcagtgagccgagatcccgccactgcactccagcctgggtgacagagcaagactctgtctcaaaaaaaaaaataataataataattattattattattgatccttctgccaatgatgtgagacagtcagggaagttggggctatcctgtttcaatgagaaactgcacatccatctagtttaagggtctcttaggtgtttgaatggctgttgcattcagatcttctgactcctattccgatactatttcttgttgtatcatactgcccctggcacctaatgcttacctcccagcaagcagaggatccttaaattgagtaatatttgggcatctggccatgtcagtaagcctactaaaattcttccagagttcaggctggagaagggaattttgagttacccttatcaatcagtcaggcaatgcagaggtacaggttagtatcttttctgtgcatagcactgtcctagattttgtggcgttctagattttaagaagggggtaacatgtgagtcgtggttaccggccttaaacagtgaattagggaggccagattatcacacacgaaaccacaacatctattgtcgcgccaccccagtggcacatgggagtgtacaccagcagatacaacatcatgtttagatgtgtcgtgggaatttagaggtgatggcatcagcatggctgaagtagttaaagaaaggctttctagagaagggaagacataggttggaccttgaagaatgggtcaggttgccaaaagaaaagaaagcaggtttgaggcagtattttcaagtaaagcaaagacacaaagcaggaaattatgcaatatattcaggacacagtaagtgggcccatgaataaaatttaagccttatcttattctttagcaatgtcacatgtttattctaagttaaaagttattatggactagataaacagactaaacctagtgccatgttgaattgtacagggactctgctttttaaaaatcagctgtgggatgtgctacagaaatcacagcatgagttacctaacctcaagccttttgaaaatctccgggcgcttatttcttaaccccagctcctaaaattactttccaacaggcaaaaattcctttgtaacatccagagggatgagcccccaggcacgttgggttcagtgtgtttgttccttggtgactttctctcatggtgacccttgtgctctattccacagcattcaggattttaatacataatgggcccttttttttaaaaaaaaaaaatcaaattccacattagctgaccactttttcattttaaaatacagatttccacctagcaataagaaggaacaccaagtccttaggtatccaggtaggagaactcctcagtgttggagaaagggctctccccggctgggtggatgcggccttaccctcatctgatccatgcagtccacggcccactctatgcagcgtccccaccacaggcctcccatctggccccagcagtgtctctcaccactctgcccattcctccctggctgcaccctgcagtccctcctttcactatcaccattgttacccaaccaattcgtttctgaatggcttttcagtgggttttctctccccccacgtttatgtttatctcattctttcctggaaaaaaataaaagaagttttactcttaggtgaaactagtgaaatgacattgacaaggatattatcattcatcttttcagtgaagtgcagcaattctccaactttttggtgtcaagaccccttggtctctgaaaaactcttggaaatgccaaagagcatttgtgtgtgttatacctattggtatttactgtattcgaagtgaaaactgagatatttataaaacaggagactacacaagcgcacgtttcatcagtgcaatttcattcagagcaatactgtgatcacatgtcacatgacctcgcttgtgagagaatgacaggaaaaaaagcaaataatgtgttagtaatattctgaaaatattctgacctcagggttctctggcacacactttgagaatccctggtttagggcttctctgagtaggatttgtccagaaacatgtgagacttggctgtactcttggatctgagtattactcctcaaacttccgtaagttttatgatctttcttagcttcaatttcctttaggatattggctgttagcaacagtctgtaagaagggactaattacagcatcggcttcataatcttgtgaaaagaaaaatgtgacatagcgcatgtgtgcgcagcaccgtgcccgatggagctgagaaatcaatagatgcttgggaaataaacaccgggggagcacccacacttttggcttcatttgtgggttggctggccttatcatctcctatattttgtgggttttgtttggacaagataatccagggagccaaggaaatgctcttagcaaatcaaatgagtgcagtaaagtttcaactttcattttgtaaaatgtcttttggatatttttatggttcaactttttgactattgaaccctacttttttctcctatcaaaacaagccatgaagaaagactgtcgtctagcttaggggaaatgataatgttcaggaaacactcctcgatgcagagtccaaagagctgcacttcaaggtgcagctttcctccttcttagctacatgagctggggagatggcttcatttttctgattctgattctacatttacaaaatgggtatttatctacattcctatgtcctatcttacaggtgtgtcaaggaaagcactgtaaggccttacacaaagataagaaaacatcttattttaatattattatttctccagcaatcattagataaaatagacataactttaaaaaactttttatttggaacgttgcaagcatatattaaagtagaaagactgcataatgaattaagtgttattacccatcaccagctttagttgatcaactcaaggccaatcctatgtcctctctatccccactacacctctcgcctaccacagataggtttggaagcaaatatcagacactgttatttcatttgtaagtattttagcatgtatctcgaaaagataagaactctttattttcagcataattgcaatatcagtatcttatgattttttatttaataaaagatttttacttaataatagaaaatattcagtgtttagatttccctgattgtctcataattttctttacaatttcttgatttgaatcaggatctaaataagatccatttgttacaattttttgatgtgtctttccagtctcttagtctacaggtttttctccatacatgaggaaaatcttctctttcaaaacctacttttaggagaaaagagtaaagtctggccacataaaaaccttttaactgggaattaaatggggataagagaaataattaaacttattaggttccttcctgataatgctaatatcaatccactgtttattgtgtgcctggaactgggctagccattataaccagaataatggctgccatttattgttgcttactttatgctagacctgttatcacagattttcagttcttttcacattttgaggtagtgttcttattctcattttacaggtaagaaagtcaggccttctgaggttacatgatttacctaaggttgtaaccatctaataagtggggcagagccaggatagaaactttgatttgtctgactccagaatgtgtgttctttgtaaaatctgccatacctaatcattttctcctcaaatctcagttacctttacaagggagtaaagatttttctttcttttggcagctggagatttgcattttacttaatgatcactgttgctggaattgcgtttctttatgatgtaagttatctttttatatcttcgattggaatttgtctttaatttttgaaattcttgtctgtgaattcctttagggtatagtactttcaataagataaccagttttagagatttctctcaagattcaacatttgtctcaaatattgctacagatgtctcaagatttttttattgctgcagaagcaataatacaattggtttagaaataatttggttcatacagttacttgtttgaaaccatttcctctatgagacagcactatttacttatcttagattcactagtagtgaatttcacagagatgttatataggaatatgtaagaaatagtctacagagggagaaatacgtgcaatagaagcaaaagaatatggcaaaggtcaatttcctgtgcatctttgcctgctgtaaatgacataaggaagagcttaggttttctgccaaaattgacctttgacaccgaccaatttatttctcatctgttggctctttttttttttcttctttcagaaaccttggctatatgacttatgggaggtttggaatggctatcccaaacaggtaagtccactataacatattcctccccttacttgaacaccaagatccctcaaattatctccttagttacgtcttggtcccctgctactctttgttcactactgtgtcatccctggcactttttctacttgagcttccttatccttattgaccctcatttgtctcattcctttagtttgtttacagttaatgtaattacatatttgggtttaaatctaccatcttactatttattttttacttgtaccacctgatgcattttcttttgtactcccttcttgcttttctatgggacagtcaagtaattaaaaaaaatactattctttttcatcccttatattgacttttcagttacacatgcttttgttcttctagtaattatcttggacattactgtatatgtccttgacttattgcagtctgatacaaatcggtgttcttacctctttccactcactgaaaggtaattagaatacaccatacaccctcctccttcaaatatttaaaaccttagaagtcattgctattattgttctgtaaatcggtcaagttaccctttttgtgctattccttgcttcctatatttccatgtttccatctgggattattatcctcctgtctgaagaagtacctttgctattttttttaatggtgggtatgccagattttgtttgtcagaaagatgttatactgcctttgacttttaaaggatatttttgctgggtatagaattctagattagcagtttattttccttcactttaaatgatgttatttcattgtcttctagatctcatcagttctaaaagaatgtagctgtcacttttagttttgcttctttgaacataatgccttttttctctttttggctgttcccctcataacacaacccatgatgtgtgcagttatcatctgacctttagccctatggggattagggatggaaggattggcccaaatactgatactctggctactgctattactgtgagtcataaactacatgctgtctaccaaggtgtctactatcttctaccagcattcatggaacttgtggctaactaacttgttagcttgcaactagggtaaaatgtcagacacttcactattctggatattttctactttcctgttgtccagttcactggtacttttcttaagccatgtctaatctactattaaacacatcttttgaattctcaatttcagttattatattttttgattctcaaatttttattttattttttaatggatcccagttctctactgaaattttctcttttaagctgtttttgaagttattttaaagtcaaagtctgattagtctcatctcttgaccacctgtggatctgttttctctcttgctcctgtctccttatgcttcatagcttttgattaaatgacagacactgtatacaaaaaagtatagatggtcaggatgatattatcttccttcacagaggacttactttcacttctgttaggtgttagaatagggcagatcacctttaatccttgattgagctgattcaaggtagacttcagtctttgtgaaggcaagtatattcacaacttacccatattctagggtattccttttcaatgatttcaaataaaatattacagtgcttaccatgactccttttccttagtcaacctgaacaccagtttgcttcctagtactctgatattacagtcactactgcttaacttctgctgtttcttagtctctgggctccatactgcttataaactggcatatgcagaatttatgatatgtataggatggtcttctttgaatttattcttagggcctacagtacttctcaagaaacagggttcacttgaaataaaaggttcgctctagtgcatttttcttctctttaggatcttgactccacaggttctggatgccctacttgctctctgacgtcttcaaacagacattctttcttgtcctttatccagatttttaagttgttcttaataggaggattagtctcatatagtcctgtcatagaagaaagcagaaactctgtctcactcttttatggccttatcaaggatgaggagttgaccaaaaaaattcgttatacgttagcctcagcattaaagaattcaataaaattagacaataagggacctaagaattagctagaccaaaccccaggcctatcatcttctgtctccaacttactcatatcttctcaggtgtatcagttatccgttggtacataacaaaccatccccaaaacttagtgccttcaaacaacaaccatttattttctcttgatttgattgtcaatttaggctaggctcagctaggcagtgtttctgctccatgtggtgtcaactgagttcattcatgcattttcagacaattgggaggccggctagggaatggctcaagtctatggtgacgtcattcatagcattggcgatcagcaccttgattctcttctttgtggcctcttcagcaggatggctcaggtttcttacatggtacttataaagtctctgcatgcatcacatttgcttatgtctccttgaccaaagaccaggatcaagtccatagtcagtgttggaggagactgcacaagggcttagatatcagaaggcaacattcattgggtacactaagtaatataatgtctcaacttagctaaaataaacaccaccactcccactataaaattgttaagaaaattctagctatgaaaattttattattttattcagaagatatttttggagttcttaaataattatgcatattttattactgtcccattttagaatgggctaattctgaccaccagcctgtcaccagaaaagagattaagacatcagattttgagtaatattcaagaaacattaatcaaagtaaattgtaggaccagcagaaaagacttcccattgttcctaagtaaagatttttaatttttttaaaaatttaaacttgactctgaataaactgaaggcatttacacctgtggcagttgtatttaattttttaaacaaaacattcaacttgggtttggaatacttgtctctacccttttagaaataaaatgccttaaaatattatctttaattccttcgttgaaatataaattgaaatatcagtcaatgttattttatggaatctggtgggatataaataggtataaaaggaggttttagtgcattaaaatgagttgcttctatgatggcatttaaagtaatgaatactcttcttttcctcagcccctgctgccatcccagtactggtactacattttagaaatgagtttttattggtctctgttatttagacttggctttgatgtcaagagaaaggtaagtgtcttatttacaaagcttctttatcaatttcttcaaaaattgccatctccctgccccaaattctaatctttaagttgtatttttctgtgtttttgggtccagttcattgcttttgtgtgctttatagtacataaaatattgctaattatactcatgctttggtgccttggtaaacatttgtagtgaaacattataaaaactttaactttgaagctccacctctgttcaataagaaaaaaaacatttcctttatatgtctgtttcttgggaacttaatgtccatcagtgcaaagaagaaatatgttagtagtattaattctacaaccacatcttttagttgattgcaaaaccacttcatatacaactttttgatattttcaaagacgttgaaaacatttttccattaattcatcaaatatatttatgaggaaaccttgcttcgggcattattagctttgctttatgtgcagggaaactcagtcacaggcatgctaaatgccacttctgaagtcacaaagtgaggtattttaggaatggtttggttgttactgattcctaattactaatccagcaaaccatgttaaatcctgaatgcaatcataagattttgtcgtatatgtaagcaattcagatcaaatgataaattctcttggcatatacctcataaactacaccgtaaataaaaggctggtttgtagcaaaatttgtatggtaaatacaatgacatttaatattagataaaccagtttagcttgattaaatgtttgtgttgagtgatggtggccattataagggacacactgcagtcaactggacatcttaagacatgagaaatctaagtataagcacatactgtgaaagtatctgatagaaataatctccatttccatgtaactcaatgatagctgtagattaactatactaactttaggctaggaatacatcaaaatttaattggttgagtcattttttccagggatagaattgaaaataatcattttttagaaagtctttatatacaggtaggtcgatcatgtatttcacccacctttgattttgccgtagttgacttcccttttatcatttacgggtgcattgaacaccttcttaaaaattaaatataaatatatgttaaatgtcttataaagatgtatcttcagaaacataaagctattgggaggtggctaaagcacaggccctggagtcaggtctcctgggtttgaattcctggcttcaccacgcactaacatcttgagctagttagttaaactctctaaacttgatctccttatctataaaatgaagctaaaaatagttcctatctcctctgtttgttgtgggaattaaacaggttaatctgtataaaatacttcctgaggctgggcgcagaggctcacgcctgtgatcccagcactttgggaggctgaggcaggtggatcatgaggtcaagagatcgaggccatcctggccaacatggtgaaatcctgtctcttctaaaaatacaaaaattagccaggtgtggtggcacatgcctgtagtcccagctacttgggaggctgaggcaggagaatcgcttgaacctgagaggtggaggttgcagtgagccaagatcgcaccactgcactgcagcctggtgacagagcaagactccgtctcaaaaaaaaaagaaaaaaaagaaacttcctgatatacagcaagtgctcaataaattgagctattattggtattgtatttactttggctatgaggaagctgaaatctttaagttttttaaacatctttattgagatatccacatataacacaattaaaccatttaaagtatacattcagtagtttttaacatatattcagagttgtgcaatcatcatcacagtcaattttagaacatttgtgtcatcccaagaagaaactctataccatttagcagtcactcctcgtttctctcaacctccccagcccctggcaaccataaatctcctttgtctctatagatgtgcctcttctggatattttatataagtggaattatataatacctggtcttttatgtttgtcttgtttcacttactgtaatgttttccaggttcatccatgttatggcatgtatcagtacatcattactttttattgctaagtaatagtccattgtacggatggatgcattttattcatcctcttatcagttgatggacatttgggttgtttcctccatttggctgttatgagtaatgctgtggattcatacacaagtttttgcatgaacatatgttttcattccacctaagagtggaattgctgggccatatggtaattctatgtctaatcttttgagaaactgtcagactgtttaacaaagcagctacaccattttgcatccctaccagcactgtattagagttccagtttctccacatccttgccaacacttgttattgttcatcttttttattatagccatcctagtgggtgtgaagtatatctcattgtggttttggtttgtattctcccaatggctaatgattgagcatgctttcatgtgtgaattggccatttgtatattttctttgcagaaaacctttaagtctttattatactcagtgacagtagctttccttaggctagattgtcttatttcatatgcactaacttatttaatggttgtgtagatttattatatcaatcttttttttctttttggggaataggcaggggctaaacaataactgtaggtgtacacaggaatatgcttgtgtgtgtatgcatttattgtgtgttggggggcagtgtgtgtgtacacatatatccagtgtgggatggtatctcaacgttaaatgatttcatcaacaagaataatacatgtcttagctccctcacaaagattgtgtttaggaagtaaaagcattttataaatttcaaaacatgcagatgtaagttattggtctcattattattatgattatctcttccagtgattgggaaataaatgcatttccttaatggcttccattttccctcatcttacaggattttctagctcatatcatccaccacctggctgctattagtctgatgagcttctcttggtgtgctaattatattcgcagtgggaccctcgtgatgattgtacacgatgtggctgacatttggctggaggtaaacgtttgccattaaaaaactaatgacaataccatgtcctgggtttccgtaactgctcacagaagtaattgtgagcaatttagcagagctctgtgtcctgaaaacacccaaattctgagaatatctctagattcccagatcctccaagattacagaaatgaaacctcttagttttaactttgaatccttctccatggtactagagagatgttaatttgtgggattccactcctgaaggttgcatgcacatgcccactcaggaagtaagatgggatatttgaagaaggaatggactctaatcttctaaaaggaaaacttggatttatgacattgaggattcccaaatttggatggcaccatctattcacttaggccaatgcttgaatacccgttgaatgttcacactcccccaccctcccctccccgagcccaatcccttgctttaaggagtgtaagatgattttttttaaggccctcattttctaagggaggaagagggcttagaatgttttctgaaggagtcaacattaaaacaagagtcttcctaatctcaccccacacaaaatagaagaaacaaagccacgttgggattgttttccggacctgtttctgttctattttgattcttgttgaccccaggcagtgatggaattgtccccttctctgccagatctcttgctgtatttagagcaacagttcccagaactgctgagttatttgtttaaatatactcatttataatgaatccaggggaaatgacgctaacccatttcacatttgggattacttttgaagggctaacaattgaatacaggttgctatggaagaaattaaatttaatagaatcttattcttctaggttggggtttagcaaacttcttggcaaagggccagatagtaaatttagttttgtgggctgcgtatgatctctgtcacatattcttctgtgttttttgttttttgctttttcaaataccctcttaaaactgtgagaatcattcttaagggctgatcggctttagcccatggggggactgtaatttaccagaccctgttgtagaagccaccagaagtcacttgcagccatttcaaagcaactggccactattaaaatatcctctgcgtacagaattttgtttctaccctgtatgtaatcatcattagacatgtaaatcccattctaaaggtcaagattattatatgtgcttcagggcaacaaatgacttagcaggagaaggattgtgccgtttttttctgtatggtgctgtctggatgcagccctcgctggtgtaattacctccttctctgatcgtatctcagtaatcctgacagaagattaagaccacactggccccgacttaagaattttatacgactctgttgcttctaaaccctcatattcaattgcctttggtgtgtgtccaatgtaaaaacagcctcattgtgttattaaaggggagttagatgttcaccctgggaataaacacggggttgccctgccaccctccccaccctttcactgatgtgacatgattccctaagtaacttggacaaatcacttattgttttgttttctagccccagctgtaacatgagaattcatatctgtccattggggtatgtgatgaagtttagctcattattacctgaaaacgttctgaggtccttaggttaaaaaaaaaagaagaagaagaaaaatgaactgtccaatcttagaggttccctcatgggcaaactttaagaacagcttcatattgctaatgattgagaatcattcttgatccacaagtcatgatctgatgtgaggttcgatgagcaaggctggtacctcccatcagctggtggtagacaaaatattaagtggtggcaggggcctatttgtgatgttctcccagggtgcacagcccatggcttacttgaatagtgtgttttagggtttgttttcacaatcaagttctaattgaacccagacatggcacaacttttgcacctggcttctttgagatggtgcctattcatctttcatatttctcaagacactgggtcatttcttagctctttcttttggagaaaaaacagccttcacatctaccactctcactcgtaagtgaccttctttgacttcttcattcatcttcctgatcctctaagtttccacatggtcaagtttggatccaggacccaatatcctgactgatacttagcaagcaaaggggctgctgtctaccatttcatcattacacaatccagaatatgttctgtgtatgttttgcccaaaagtgtgttacttcaccctcacaaatggactcacagggatcctctcccatgcctgtgcacatcccttgcttcccacccagctagcccctgatccttccaccagcctcccactccactacagtcactctgaatttgggcgtttctctccacacccgtctcccacccaccaggcacaccaacctctctatgtcagcaactgaagctgttctctgggggccctctgccaaccccacagtcaggccatattctcaccccttggtagtatggcaaaatatgaaagatgccacgtgaaccctttctggaatgtaaatgtgttgcctctcttgctctggaagggccttgagcctctgggatgaagttggttctgaaactgaccaagtctaagccacgttccctagaagagtgatctgtgccccagcaactcctcccacctcctgctcccagactcccactccctattcccaccagaaacttccctcttcagccctggacactgctggataatgcactagagagcgcttatcaattaactgtcttctaccacactcagcaaccctttctgcagttctttctattcaacacagataatatgagcagtatagactagcataaaagaattaggaaagatcaaatgcttgaaactttatttcaaccagttcaggaccccgagagctgcctcccaactttgcctcttccctcatctgccttgaaatagcctccttgactgcagcattcccagcccagctcaggatttcccacttgtcccagcctttcttcagtccagttctcctcccagttaaatggagatatgaaataaatgcccacatgaagtgcatgccaaaattgattatgctaacttaaagtgttttcaaaagacacgagtggtattacaggcatttaaatatatttctaaaaaacattatattatgcaaaatgtcaaacatatggcaagataaagggaatcatataatggacccatcagctttagcagttatcaatatggccagtcttgttttatctattgccccacctgtaccccctactttccacccagattgttttgaagcaaatcccagacctcatatcatttcatttataaatttaactttaaaaatgtaggctattgtcactttatctgcagtttctttcttttttgcagtctgctaagatgttttcttatgctggatggacgcagacctgtaacaccctgtttttcatcttctccaccatatttttcatcagccgcctcattgtttttcctttctggtgagtagaccggtgatgtgccctgcctttggtcagtgtgcagaggtggcctcagtgcatggttaccctcagggcattgccctttccatacgtgggtctccagttatttgtgtcaagtgcagttggagaaaagaatgtgatggagccatttttataaataattaaaacaacactctgtggtgtggaaaaggcttattacaacgggagatggaaaatgtgtgacctgacgggcaagcagcagctcttactctgtcttgtttcatggatgtagacctttctttgtgattaacagcttttctagtcactcaatgaaaagtcactgtccaatcaccagttctctaaaagagaggtatgttctgtgttacaataattatagccattacttgaatgccagacactggattaggtccttcccatatcttggctctagtctacacaataactcataaggatgagtattatcacttccacttcccagataaggaaaactgatacttgtttatttcattctctatgaccactggttctaattatggtttgagtatcctttcgatatgattggctctcgatcagtctgttgattttgtttagccacagaccagcaatgaaaagcatatattacatctcccatgacaatcatttccttgggaagcataatgttccatgtgttgattgacagaaaccagagtaacatgtggggaagacttagatggtttggaaggaacagcttttaaccaaccataatttggggctagtctgggaacttgggatcctccaaacagaagacttagtgctgttgaagagcctagatgcaggggaaatggatggagactcaagttccaggcctcattcttaagtgtatagacagcacccttggctggcatccagggaaatccagccagagaggtcaatgccctttcctggaagccagctgcattctttagaccatgtgtattcggcattttctggagaggaacaacagagtgtagtggttaagttgctacatgtgagagtccatcctggatttaaatcctgactccacacttacgacctttgtgatcttgaacaggttataccacctctctgtgcctcagttttctcatatgtaaaatggaaataagggttggcatgaggcttaactagtttatatagtttggaacaatgtctggtactcagtaaagaatcagtaaatactacctactataattaaacatattaatgagtatctcagaatttgaagttcaactagaatcaaatctaagataaatgtctcagatattttccttggttgataaatcattaccatcacttttactttgactgagcaagtgtgtttgtgaaattttagtaatggctgggcatggtggtgcatgcctatagtcccagctactcaggagcctgaggttggcgggggggtcacttaagcccaggagttctagatcagcctgggcaacatagtgagaccctgtctttaaatatatctatatctatatctatatctatctatctatctatctatctatctatatatatatatatacacgtatatatatacacatatatatagacgtatatatatatacatatatatgtgtgtatatatatatagagagagagagagagagagagagaatgatagcaattattgatagaataatattgacttgctgatgacagttgggcatagcttttcagtgtgactttcatgacactatcaatccagcatttgcccctcagttcgccatgtcccaaaggcactacacgttccaattgcctgttgctgtataacacagcatctaaaagtctagtggcttaagacagcagtgggcaaactttttctttaaaaggccagagaatatatattttaggctttgagggccacctatgatcttttttgcaagtttttattcattttattttgttttataatcctttaaaaatgtaccaagccatacttacttagctcatgggctgtacgaaaacatacacccaggttgcaggccggattttacccacaggccatagtttgcagacctctgtcttaagacaacaacatttattaattattattattattatttctcatggttctaggagtcgattggccttggctagatgattttcacttagggtctcttgtgtggttacagttatatggcggctgggcagtcacatagtgtctagagtcctcaacacatggctgaagtcatatatagaaaatcaggctaggtgcagtggctcacgcctatatcccggtactttgggaggccgaggcaggtggatcacctgaagtcaggagttcgagaccaacctgcccaacatggtgaaaccccatctctactaaaaatacaaaaaaattagccgggtgtggtggcacatgcctataatcccagccactcgggagcctgaggcaggaaaagtgcttgaacctgggagacggaggttgcagtgagccgagattgtgccactgcactccagcctgggcaacagagaaagactccatcaagaaagaaagaaagaaagagagaaagagagagggagagagggagagagggagagagggagggagggagggagggagggaggaaggaaggaaggaaggaaggaaggaaggaaggaaggaaggaaggaaggaaggaaagaaggaaagaagataagaaaatcagctggctgatgctgcttgtgcttattggctgggacttcagctgggggctgtccgctggaatacccacagcccctctagttggccttggcctcctcatcgcatggcacctgcatttcaagggtgagcatttcaagagagtgctagagagatgctgcatcttttttcataaacagcctcagtagtcacatcacgtcatttccaaccttgtattttttattggaaccaggtcactaaatctgactcatattcaagggaaggaaaactagactccatttcttgatgggagcagtttcgaagaatttgcggatgtttttaaaaagcacacaccatggaagctctaggtccagggaactctctgagaagtttctgcaatattgctgccatggttggcttttgatttagcaatggagaacattcacctcagactatcccatgatgtctcaaaataaacaagcaagcttacttacccataaacaattgagcaacacagtggtgctcagtgattgtcggggtagtgcgctattttcccacactgttgtctttaaaaaccctacatttaagaactcattctcatgccagcatttctggttttcaaggagaattgagttacatgtgtttggcattttcttgatctttatactgaattcacttgcccattggagagggcagccagtactcctatttgctgtcttcaaggagttgggttgcaaataaaccaatatgaacagacttgactgtaaaataaaacgaaacaggccaggcacggtagctcacgcctgtaatcccagcactttgggaggccaaggcaggaggatcacctgaggtcaggagttcgagaccagcctggtcaacatggtgaaaccccatctctactaaaaatacaaaaattagccgggtgtgatggcgagtgccagtaatcccagctactcgggaggctgagacaggagaatcacctgaaactgggaagtggaggttgcagtgagccaagattttgctattgcactccagcctgggtgacaagagtgaaactccatctcaaaaaaaaaaaaaaaagttcaaaacaacagcaaaaacttttcctggtaaaaatatttctgtattgacgttgactgattctcattgtttggaaagttgagaaaaacctcaccaagccattggaagtttggcagatcaattttcaatggtctctgaaggaagtatgtcaatcagagagggagcttctttcaggtacagtgtactgctctagtttaaatggtcttcccaccagcatgaacttgccaccagcacaatcatcttcatggagtcaaaggggaagatttagttccttgttgttagcttggccccaaccctctgtctaaaacttataactctgtagattcatttttcgaggatgctttattctatccaaatgtactgggattttactatggagcaagcaatgtgcagatcataggtatcattggagggtggcttaactaacctatttcaccattcagacattttagaggcactgtgggcggcagtttgcaatctagttgctctgttcttctttccagctgcttttgttgcacatcctgtggtgatatacacggtagggcggggcgaaagctaactggggttgtgcccatctgagatttgtctggaagccttgagaaggagagctggagtgtgtgcatttcccttgccctttctttgacctttctctgattttccccagcctcaagcacatttgcatactctcctaacgagtctccctttcatgtccagccactgcactcttttacttctgaggatcttatcccattctcagtcagcatctgcaagagttagttacgttggttttctaagcattgtttcattaacattaggcagaaattcaaaagcacactggtcaaattgttttaatttaattgcctggtaactccatctgtttgcattcctgttcaaaaccatttaaatcgcaggtggatgtttttcacactgtattcccaactattgttcttaaaaatgatttctctagtttggaattattggatgtatctatcttcttgagcattatccaaatactcacagagagttattaggctagaaagacctttctaaggccaggcaaaccacttcctctgactactaacagttttcctccacaaataacaagagcagatcgtggttccacgcaggtaggtccacctgaagggaaggtgtgtgtgccctgttttgctggttttgcaacctgtgagttcagtgtctgtcacagctgagtgtgcagggggcagggtggcttgttgcttcatttcttgaattcatcacagctgggtgttacgaacagtacaaggggagtgagacccagctcatgcctttcaggagtgcattatataaggcagtagagagatctttgtgtctaaccctgtttcatgtggttgaagactattcacattgacctgtgtttctcagatgtctcaaaaagaaaaatacaaaacattttcaactgcaaataatactgaaatacctagctcccttacttccaaggatacatatgcttgtaaggtttctccctcaccactggttcactggacttcagatttcagcgtttgatgatccagctattacaagtgtagaaaaatggtaccctgggaagtccacatgtgaaagggaatattatcgacaatgagaccatgtaaatacttggaatggctaatagagaaaggagagttttaaaaaacagagaaagataaagctgaaagcacccaacagtgctcttagctgatgttcatcagtggggacccgggatgagggaatgatggacccttcttttcctctgaaggcctgaagccttggtcctaaatgagaagcagagggcagagcatcggttctgatggcaccatggtcagcttagtgccgtttgcgcaaccagcaaagaaaaggaaggtacaaggcaagaaagactctgttgaagctgggccactcccttgagccaccactgcagatatgtatctcagaactagactttccagttccacacctgatgaaggagactacctgttctaccacatgtgttcactgtctcactccacaggggcccttagaagagctctcctatcttgcccatgtgcttggtaccttctttatgctatttttgagttcacgaagaacagctacaacaatcacccctcttcaaaccatagaatcctagaataaggaactttatttataatgtagtccaatccttttattcatgtattcatttatttagaattttttttttttttttttttttctgagacagagtctcactctgttgccaggctggagtacagtggcctgatcttagctcactgcaacctctgcttcccgggttcaagcgattctcctgcctcagcctcctgagttgctgggactacaagtgcatgccaccacacccagctaatttttgtatttttagtagaaacggggtttcaccatgttggccaggatggtctcgatctcttgaccttgtggtctgcctgcctcagcctcccaattttagaaataattttaagcttacaaagaaatttctagtatactacagagaacccctagatatactgtttaccagttagcattttgccccatttactttgtcattccttctctctctacttccccaccacacacatgtatgaatatacatatttgtttctgaatcatttgcaagttgtaaacatcaactaaataattccttgtgccctaagtaattcagtgtgtattgcctaagaagaaggacattttcttacataatcacaatacagttatcaatcgcaggaaatgtagcaatctaccttccatgttccaatttggtcaatcaatccaatgatgtcttttattgcttttccccctgactgtgtggggatccagctccagatcacgtattgcatttagctgtcattcatctggaacagttgcttacctcttctttgtctttcatgtcgctgacattgttgaaacatttagacaccacatttatttctcagatgaagagttaaggtacttccaggatcacatagctggttatggaagaatcaagactagaaacaggatatttgaaacacagaacagataggcttcaaattaaatttgaaagtagggttaagagtgtatcatttgccttcactaaatatttattaagttttcttcaactacccagtcatttagaaacttaagagatcactgaggtagataattgttcacctgtagaacaagtatttgctatcctaaaagggcttaatgctcatacccacaattagcaagaaaataagacccttaccttgcaattttcattagacaaatacaactttttggtggttgccttagctagtccagcaaaaccagctaatatttataccaacactgcaatttattcaaaccatgccaactccagtgattggaagagctaaaattggaaacaaaactgaaaacagaaaaagctgagttttgcaatccaagggcatggtagtagcttatccatttggaaaggttaaatccagtggacagggacaaagtggttctaagaatttaggaatatagcagtctttcggcattctttatgaaaaggaaaattccattcagttgctgtaaggtggtgactagcgataatgtgcaagtgttgtgtgttctatgcatgtgcctgcacacatgtatgcacgtgtgttaggaagagagctgggaagggcagatggaattttttttctttttcccagtcttcttttagcgtagaaggagaggaaacttgagagactagaccatcctttattgaagtcttgaaattttaactgtggcatcatagctggttgttacccgtgccacaatggctactcccctctgactcctgttccacttctttggcctccagtcccctctgtcctcttgcagagaatgttcaggcagcagagtccccattcctcggatcctgcttaccctctccaaagtggactcctcctcttccccttggcaggaaatccagccatttcaggagcaccctcttggggggtgttgctctaactgtgttactggtgtaagttctctgcagtaggagagggctagttgtgggaaagtagtagtggccatagtggtagtaagagtaatagttgtaactatcatttttgaatacttactatgtaataggcactttccatttgtcaactcattgaatcctcataaccacctgggtggtgttctcattttacaaaagaaactgaagcccagagagattatggaacttgctaagatcctgggagccctgattgaaatcttgaagactccagcgccaattccactggcctctcctctctgcccagaggctcagctctcttagaagacatttgcatcttaatggcagcttctttcattctgagggctatacagtttgtaaagctggctgtgtgtctcctgggagcctctagtcaaaggaggtggtggaggggcagctagttttacccagtgactaaggaactaaggctcagtgacttatgcaggtttcgagccaagaaattagtggtgttgagccttgaacccagctctgatattctgttccacatgtgtcactcctctttctaaaaccagccaagcttcctgttgctctcacaatgaaggccacacctccaccctgacttgcaaggcctacctgagatggcttcttcacctctcccacctcatcttacaccacccttcactgccactcctctcctttaagccacactggtcttcttttagctcctcgaattttccatgatgcttcccacttgacagcctttgtacatgtagaaccctgccatatgccctgtcattttctttctttctttacatggatcacaatgggcaattttatgtttagttaattattcacattctccggtagactgtgtaaagaaggtatttttgagtaggtccttttgtcaataataacactgacaaattcccaataggggacctagtaaggggcaaggccctgagccagacaagggaaggacccagaggtgaaggtgtcctggccacggcctttggaaagcttgcctgctagtgaggaggggagagccaggaggaagggaataaattcaggggtgaccagaattacatggaaacttttgttgtggagagacccatgctttaatggatggaaaggggttcagttgaaaagagaaagtacattctaggcagaaagagtacagaataaggcccaaggatccagcaaaccagaatggcaagtaggtttttacatgtatcatttcctctaataagcctataaataaatgtgggtaccagaaggtaaaccctactagtttaggggttttggtccctctcattcattgctatattcctggctactaccaagtgtcaggtagcactttagtaggtgctcagtaatggtttattgaataaataaggtaggtactctctgctcgcattttacagatgaggaaatgcacaaataagtgacatggtatctaagtagtaaagccagaactttaagaaaatatgggaaaatatgttttatattgatggggctgaaaaaggacctttaaagcataacatgtatgcaaagtataaaataagcaattgacagatttgatttaaaaatttttttaattactttgccaaaaaaatcagtattgaaagaaaatactggactgtataaagctaattaacataatttaaaaatagtgttgatatctttagtatataaagagcatttaagaatcaacaggaaaaataaatgctccaatagaaaaatggacagatgccacaaaagcagttcataaagaataaataaaagtagccgagtaaaataaccaataagagatataaatagatgtataaatatatatagtcactatacattaaataaaaatatgaatataaacagtactctgttattttaggtggagactgataaaatacaatattggtcaatatctgaggaagcagatactcttatatattgggtgcaagaatataaattggtatagtctttctggaaagcagtgtaacattatattccaaattgtaaaatgagtctactctttgattcaggattttagctattctaagtggataatcaaacaattacatcaaaatgtttttatagaaccacacgtggtggttcatgcctataatcctagaactttggaaggcttaactcccttaagcctagaagttcgagatcagcctgtgcaacaaggcaaaaccctgtctctacaaaaaacaaaatacaaaaattggccaggtattgtgccgtataccaggagtcccagctactcaggtggctgaggttggaggattgcttgagcctgggaggtagaggctatagtaagctgtgatcatgcctctgcactcctgcctgggagacagagcgagaccatgtctcaaaaaaaaaatgtatttacaagtaattctcacagtattctttctaatataatgaacatttgggaagaatttaaatgtctattaataagggattagttaaattatgatatatctataaaatggatttctgtgaagccattatatatggtgatacatagtaggggttggcaggctatggctcaaaggccaaattcagcctattgcctggttttgttgataaagttctattggaacacagacacacacactaatgtatgtactttctatacatgaattagtttatgtaatgttagctgtcatggctgcttttgtactgtaatggctgaattgagtagttgcaacagagaccaaatggtccagaggcctgaaatatttattatcttttcctttacaaacaagtttgctaactcttgatatgtagctttgtttattgttgtggaaagctctctgtaacatgttattgcatgaaaaaagtagggtacaaaaatcacacataggtagtgatcacctcgttacataaaagcatgtggtgataggaggggcaaaatagaagcactttaaagaatatagttttgagagagatatcctaaatcgtttaacaaaatattctgggttacctgtaagttgtgagacttcaggtgatttttcattccttaacctctatatatttttctgtaattcctaaatttttaaaagcaatcgagttattacatctttttttttttttttgagatggagtcttgctctgtcacccaggctagagtgcaatggcgtgatgtcggctcactgcacgctctgcctcccaggttcaagcaattctcttccctcagcatcccaagtagccaggattacagatacctgccaccacacctggctaatttttatattttttagtagatatggggtttcaccatgttggtcaggctggtcttgaactcctgacctcaggtaatgcacctgcctcagcctcccaaagtgctgggattacaggcatgagccactgcacctggcccctgtttttcaaacaaagaacttgaactgataacttacaaaagaagaaatagagctactaagcagacataggggaaatgttaaggccttgcaaataatgtaaactgaaagtattttatcttttaaattaacaaattttgaaactatttcatactggttctgagttcagtgaaactcttctttcataaattgctggtggccttataaatagttacaatttaggaaaataatttggcaacattttagtaccttttaatatacaatcttgaattttaatatctttaatgtacaccttaaaacagtaatctcacgtttagaaatatatagtttcatagaaataatttcagtttatgaaagactatatacatcaagttgtctaaatagcataaaatgtctttgatttaaagctaaatgtaattgaacataaaatctcacaaatgttatgtttactgcagtggcaaaaatatagaacaatatgaagtaccaacaaaggtatagaacaactgacattctcatgctttgctggtgggaatgtaaagctaccactctggaaaatagtttttcagtttattataaagttaagcatatatttaccagatggcacacaattctacccctatatacttacccttgaaaaatcaaaacttctgttcacatataaatatctgcatgaatatttatagcagttctattcataaatgtcaaaagctggaaacaacccaaatgctcctcagtaggtaaaaaaacagtgatgcagccataaagtggagtgccactcagtaataagaaggagcatgctattgataaccatgacaactgaatgaatcttaaaagcattatgctgtgtgaaagaaggtggccttaaaagctcacacaacgtatgattccatttatgtccttggaagacagaccaaaggatacagagcaaagtgtttgccaagtttatgtgtggaggagggtgtggcaataaagggatagcatcacagaatttttttggcaagataggctgttctgtatcctaattgtagtggtgtttaaataaacctatagacatattaaattcattgaacaatataccaaaaaacagtaaattttactgcatgttaataaaaaaattaaaaaattgtataggaaaatactggaagagaatgcatgaaaattacaatattgtttgtttaaggtgatggtgttatggacaattttcttgtttccccaatgttacatgaaaaaaattatttctataactaatatacttacaaacaaacctattgaaagactctaaattcatagtgctatataagtttgagaaataaacaaatagcccttcatatggcaataatatcttttttttttttttttcacggaatcttgctctgtcacccaggctggagtgcagtggcacaatctcggctcactgcaacctccacctcccaggttcaagcaattcttttgcctcagcctccccagtagctgggattacaggtgcatgccaccacacccagctaatttttgcatttttagtacaaatggggttttgccatgttggccaggctggtctcaaactcctgacctcaggtgatctgtccaccttggcctcccaaagtgctggtattacaggcatgagccaccatgcccggcccatatggcaataatatctgaagacactgtgcatcttaggtcatcaggagcagttcaaattgtgtccaggagcctgtttatgaaactaataaagcatacaatttactttaggaagcagaagtgttaagtactcatggaatttttgctttgttaaagcttcttttatttggaaaatgtacttttgtagaattctctattcacctttgatgccaaataaatgagattgtgttttaaggcaataataacctcatgtaaacatgcattatcttatttgttcttcaaaatcctctagccccatcaccagaaggtaaaaatggttagtgtatgcttttgtttgaaaaaaggaaaccaaggtacagaaacattccagtttaaacactgggtaataaaaatgctgtttctttaacttttcttcaggaagacagattgtactttttttgttgcttgccagtaatgatatttaagataatattatcgtatcttttcttttgataattttctgggctttattagaaacgaaatacatgtatggcttaggagaaaaactatttgttttattattgaaaattcataggtgctttggttgtaatgaaattctctcaactgtttggtgtttcaggattttatattgcacgctgatcttgcctatgtatcacctcgagcctttcttttcatacatcttcctcaacctacagctcatgatcttgcaggtccttcacctttactggggttattacatcttgaagatgctcaacagatgtatattcatgaaggtaagggctgtccaaatattattgctcttaatgtcattgccaggttaatggtgaggcccggactgttgaatgttcaagttaattcatagttttaaccagaattcttttttcttgattttattatttttgattaaaattttggaaaaatagagctagatttttcataagtaggtctttaaggtgcttttaagaaattgcttttattagaagatatgttatttttgacatttttaaaatgtcaaaacttcaaaaattataaaaattgctgcttgtttttatgcttgaagaaaatttttaaacttttgcttattgatatgtaatatttgtgcatatttatgtgatattttgtacgtgcatagaatatgtattcaggacatttggggtatccatcatcttgagtatttatcatctctaagtgttgggaacatttcaagtcctctcttccagctattttgaaatatacagtgtattgttgttaactacagtcacctgctgctgaagattggaatttattccttttatctaactgtaagtttttacctattatgcagcctttcttcatcttctcccaaccccaccaacacacccttcccaatctggtgtctatcattctactctttggtatattgtttttttttttccttgggataaatatgcagtagtgagattgctgggtcatatggtagttctacatttagtttttgagaaatctgcattccgttttccatagagattgtactaatttacattcccacaaacagtgtataagagttccctcttctttacattctcaccagtgtctttcaatcactttttgcctttttaataataacagttttaactggggtgagatgatatctcattgtagttttcacttgcacatttccctgatgattagtgatgttgagcattttttcacatgtctgttggccactgtatgttttttcttcagaaatatttattcatgtcctttgcccctttttaatggaattatcattattatttgttgttgttgttgttttactgttgagctgtttgagttccctgtatattctggatattagtccattatcagatgaaggatttgcaaatattttctcccattcaacaggttgtctcttcactatgttgattgtttcctttgctgcacagaagcttcttagtttaatatagtcccatgtgtctattttggtttttgttgcctggcttttgaggtcttagccattgaatctttgcctagaccaatgtcctgaagtatttccctgaagtacttcccttatgtattcttcaagtagttttatattttgggatcttatatttaagtctataatctgtgttgagttgatttttgtatatgatgagagacagagatctagtttcaatcttctgcatgtggatatccaattttccccacaccatttattgaagaggatgtcctttcccccaatgtatgtatttttttatttctgtgaaaaatggcattggtatcttttttttttttttttgacaatgccttgctctgtcttcaaggctagagtgcaggggcatgattatgactcactgctgcctcaatctcccaggctcaaacaaccctcccacttcagccactcaagtagctgggactacaggcccatgccaccacacttcactaatttttaaaatttttcgtagagatggggtctctatgttttccaggatggtctcaaactcttggggtcaagcgattctcttgccttggcctcccaaagtactggaattacaggtgtgaggcactatgcctggccaacattgctatcttggtagagattgaattgaatctgtagatagctttgagcagtctggtcattttaatgatattaacttttctaatccatgagcatgggctgtctttccatttgtttatgtcctcttcaatttttaaaaatcagtgttttgtagttttccttgtagaggtcttttacctccttggttaaatttattcctaggtatttttgtagttattgtaaatgggattcccttattgagttctttttcagctagtgtgtcgttcatatatagacactattttttatgttgaatttgtatcctgtaactttactgaatttatttatcagatctaaggctttttttggtgaagtctttaggtttttctgggtataagatcgtgccatctgcaaagagggacaatttgacatcctcttttctaatttggatgccttttatttgtctcttgcctgattgctctgactttaatgtccagtactacgtcaaacaggagtagtaaagtcagcatctttgtcttgttctagtttttaaaggaaaggctttcagcctttcaccatttagtatgatgttagctatgaatctgtcatatatgcccttcattatgttcagttatgttccctctatgactagtttgttgagagtttttatcataaaaggatgctgaattttattaaatgctttttctgcgtctattgagatgatcatatagattttattctacattctgtcgatgtaatgtatcacatttttttatttgtttatattgaaccaaccttgcatccctgggttgaatcccacttggccatggtatgttatctttttgatgtaatgttggatttggcttgctagcattttgttgagaatttttgtatctatgttaatcagggatattgacctgtagtatttttttgttgttgggtccttgtctggttttgatatcaaggtaacgctggccttgtagaatgagttagggagaattccctccacttaatttttttttttgaatagtttaaggagaattgctgtaaattcttctttgtaaatttggtggaatttagcaatacagctatctggacctggacttttctttgttgaaagactttttattactgatccaatctctttactttttattggtctgttcaggttttctgtttcttcctcaatcagccttgggacgttgtatgtgtttatgaatttaaccattgcctctaggttttccagtttgttagtgtatagttattcactatagtttctgataatctttatatttctgtggtatcaattgtaatgtgtcttttttgtttctgattttctttattttggtcttttctccttttttcttggtcagtctagctagcaatctattttgtctatcttttcaaaaactaacttctaattttgttgattctttgtaattattttcagtctctttcatttagatttgctctgatctttgttatttctttccatctattaattttgcatttggtttattcttgctttcctagttcattgaagtgcatcactagattttttatatgacatctttctacttttttgatgtagaagtttattgctataaacttccctcttagcactgcttttgttgtatctcataggttttgatatgttgtgttttgattttcacttgtttcaagaaatgttttgatttccctcttaatttctttcttgacctagtggtcattttggagcatgtttttttccatgtattcatacagttttcaaagtttaatttccatgtattcatacagttttcaaagtttctcttattattgatttatagttctaatccattgtggtctaaaaagatactacatataatttcagtttttttaaatttgttgagacatgttttatgtcctaacatatggtctatcctggagaatgtcccatgtgctgatgagaagaatgtgtattctatagccattggatgaaatgttctgtaaaagtctgttaggtccatttggcataaagtgcagtttaaatccaatgtttctttataaatattccgtccagatgatccatctaatggtgataggagggtgttgaagtctccaactattattgtattggacttcatctctctctttagtaatatttgctttatatatctgagtgctctattgttggctacacatatatttagaattgtatttcttgctgagttgatctctttatcattatataatggtcttttttgtctatttttactgttttttgaattaaagtctgttttatctgtatctgatataagtataggtgtttctgcttgcttttggtttccatttgcaggattatctttttacattcctttacttttagtctatatgttttgttttgttttggttttttgtttgttttgttttttgttttttttgagacagagtcttgctctgtcacccgggctagagtgcagaggcacgatcttggctcactgcaagctccgcctcccaggttcacgccattctcccacctcagccttcctagtaggtggaactacaggtgcccaccaccacacccggctaattttgtttttgtatttttagtagagacagggtttcaccatgttagcccggatggtctcaatctcctgaccttgtgatcttcccaccttggcctcccaaagtgctgggattacaggcatgagccaccatgcctggcctagtctatatgtgttttcacaggtgaaataaacttcttgtaggcagcatatagtgagtcatttttaaatccattcagctagtctatatcttttaagtggaaagtttaatctgtttacattcaaggttagtattaatatgtgaggggttatttctgtcattttattaattaatttctagttgttctgtatatcctttgtttctttctttctctcttactgtttatcattgtggtttggtggttttctgcagtggtaacatttgagtcctttctcttcttcatttatgtgtttgttctaccagtatgttttatacttttctgttttcatgctggtagatatgattttttcacttctggatgtagaactgcctgaagcatttcttgtagggccagtgtagttgtgatgaattcccttagtttttgcatatctggaaaatactttatttcttctacatttataaaagataagttttctgagtatagaattcttggctaacaggttccccccctcccccactttcaggactatggccatatcatcccattttcccctggcctgtaaggtttctgttgttagtccgatgatggttcccttacaggtgactagacacatttctgttgctgttcttagaatgctatctttgtttttgacttccaacagtttgactataatatgcagtaaagacctttaagaatcatgtctatttgtgaatctctgaacttcttgtatctggatgtctaaatctcttgcaaacttgggaacacttcagctattattttgttaaataggtttctatcttttttattttattttcacctctgaaacaccaaaagttcaataagttgtttcccttacagtgtcccatatgtcctgtaggctatgttcattcttttttcatttttttctttatttttatctaatggagttctttcaaaagacctgtcttcaagttctgaaattctttcttctgcttgatctagtctttttttttttttttttttttttgagacagagtcttgctgtgttgccaggctggagtgcagtggcacgatcttggctcactgcaacttctgcctgccaagttcaagcaattcccctgcctcaacctcctgagtagctgggactaccggtgcatgccacatgcccagctaattttttgtattttagtaaagaaggggtttcaccatgttggccagaatggttttggtctcctgacctcatgatctgcccaccttggcctcctaaagtgctgggattacaggagtgagccaccacacctggccaatctagtctatttttaaagcatttgaaagtattttgtatttcattcaaatgaattctttacttccagaatttctgtttggttcttttttttacgatctctatctctttggtaaacctctcattcacattatgaattgtttttctgatttccttgtattgtttatctgtgttctcttatatctcactgaggttctttaatataattatattgagttctttttcagggatatcttaagtttgtttttattggaacctgttgctggagaattattgtgttttttgaaggtattagatttccttgcttttttatgtttccgtgtccttaaattgatatctacacatctggtataacagttgcttcttacattttttaaaatttgttttcatagaggaggatattttcctgaagatgtacttgcagtggttgttggtagggaactttggttgtgattctgggtgcatgcaatattgtagtcattatgtgattttttttggctataaacaacctcagtggtgtctgtgaatttttcattggctcagggtgcagttattggagactgtggtgaggttttgctggggatgggaatgccaagtgggctagtccttgggccccagtggtggcagcagtgggccaaatggtcctgtccttgggcactagtgttagcagctccaggcgggctgattcttgggccttcagatagctttcccaggtgccaacagtggcagtgatggggcaggaggtaggttggcctttgggcccctaggcagaagctgtggcatgggcaatggcggtagcagtcacttaacaatcctctggctcccaagtggtctgcattggtgttggcagtggctgcaatgggataggacggccagtccccaggcctgcaggttgcatgtgcaggtgagtactagctgtggtgatagcagcaggttaggtcggcacaacctgggaggagtgctcagataccaatcattgtgaacacagccagttaatttctgggccttccaatggtatacttgggcagtagggggagggagtgtggaaccaggcgaagcagacctatcctcaggccctgctgtggtgcacgcatgtgctggttgtggtaggcaggggcagggtgccctgctactgggaagagtggggttactttcagtggcagcacctgcaggtggttggctagggagcacaagcttcatccccaggtagcagctgtggatagggtaacctgtccttaggacacttgtaaatgcatgctgactctactactaaggaagtggggtcactgccagtggcttgcactttggccctggtagtggcatccagcagtgggacacataaaaatgtgtgatggcacactactggggatatcagggccactgtcaatagttactgcttcagccctggtagcaacagccagccacagcagtgcccccacatggggaatgtcagtggggctccaggaatgtgtagatgcagggactgttgtgcttcagcacaggctgcagtttggcggaggctaggctctcaaaatggcactgtgctgtagctgcttaggactcagggggtatgtgggacctcgtatgagctccttctatggagcaatgcttttgtgtcaactctaggcagctctctatgttagtcttatggcctgtgagagttgagagcctctcctgtggctaggattgcaggagtccatgatgggaatgtggactactgagatctcttacttacccttttcccacattggggagtatctccaggttcttagctgagcagacggtcttggcttccctttccttttttgccttaagtgtttcctgtcacttctctgttgaattctactcttctcttagaggatctgttcaaagtgtgattatctactcgctatttggttcctctgtggaggaggcatgtacccgatgcctctagttattctcgattttgctgctttttaaagaatcccctaatgagtcaaaacttgctccagttttggacaacctttatgatgataattgaataatacttcagagccttatgtttatttttattgaatatccaaattgcacataacgctctcccccgagcttgttccccactagcctctgaaatactgtccatcattttactatgctttgtttctgaaaacatcttctctaaataataacaaattgattagactattgattcaaacttttagactattgaaggttttttgtttgtgttgttttgaattaggttctgtgctttaattccagaacacagtgagggaaaggcaacagagatgaataagataatccctgactttaggggaaatagcccaccatctagtgggggaatgttcatctaccggcaactaactatagcatacagaatgtcctgtggtacatacaggccccagaaacttgccatggaagaaaagctaaaaagagaaattaactcaagggaccaggaaatgtttcattgagtgatggagtttgagttgagcctttaaagcaagtgaaaaagatcgcatttctgctttgtcttaaaatcataacctaccactaagtgttgatgaaaagagtcaaactctgtaaaatatttgaatagatttatcctgaaccaaatacgaatgaccagtggcccatgacacagccgcaggagatcctgagaacatgtgcccaaggtggttggactacaacttggttttagacattttagggagatataagtcatcagtcaatgcatgtaagatgtacattgctttggtctggaaaggcaagacaactggaagtagggggctttcaggtcataggcagattcagagatttttctgattggcaattgcttgaaagagttattagataactcattagataagagctgaaatcaatagaaaggaatgtctgtattaagataaggagttgtggagaccaaggttttattatgctgatgagcctccaggtagctgacttcagtgctgttatgagaccttaaaaggtgccagactgttaattcattctctcctggatcagaggaaagatccagaaaggaaaggtgattctccgcaaaatgtaggtttgctccacaagagacagtttggtagggccatttcaaactatatcaaaggaatatattttggagtaaaatatttcaatttctttcaggggctgctatctattatgtgatgttatactagagtcaggctggaacttggtgtcttattgctacaaaagtcagtcttaagatctctgttttaatgttactgatggtcagctgtgcctggattccaaaggaaggagggtgtataatgaggtgtgtctgactctcacttcccatcatggcctcaactagattttcaggtttacattggaatgtccttggctgagagggggtccatcaggcagttgggggtttagaattttatttttggtttacataagggagttttcattaaggatcttttgagttgaaagttatagctggctcacatttaggtgttactatccgtgtataatatatacagcactatattgtcagattgagtgacttgtgtgtaccaaggatgctggcagttagtctgataagctcagtttttaatcaactctttgattaattagttttccaactttagtaaatgtgcctcaaagatcactgaagagttggcaaaggaaatggaaactgccgtaattgacctctgagttttctaccatctcttagcttctagatcttcacagaggtatgggaaattagcccacatctcggttaatctaaagaaaaaaaaaaaaaaaaacctgagaagtttcttcttgaactgaattactgatgaccttgttttcttgagagccaacttttcctgttaaagttgtggtgccaaaaaaaaaaaactttcattgaatggttctagtttattaaagttctaaatagcttttctgtgatctctgaaaaagttgttttcatgcacgtctgtgtgaagagaccaccaaacaggctttgtgtgagcaacaaggctgtttattgcacctgggtgcaggcgggctgagtccgaaaagagagtcagtgaagggagataggggtggggccgttttataggatttgggtaggtaaaggaaaaaggggggttgttctctagtgggcaggagtgggggtcacaaggtgctcagcaggggagcttttgagccaggatgagccaggagaaggaatttcacaagataacgtcatcgttaaggcaggaacaggccattttcacttcttttgtggtggactgtcatcagttacggcaggaacaggccatctggatgtgtatgtgcaggtcacaggggatatgatggcttagcctgggctcagaggcctgacattcctgtcttcttatattaataagaaaaataaaatgaaatagtggtaaagtgttgggacggtgaaaattttgggggatggtatggagatataatgggcgatgtttctcagggctgcttcgagtgggattaggggcggcgtgggaacctagagtgggagagattaagctgaaggaagattttgtggtaaggggtgatattgtgcggttgttagaagaaacatttgtcatttagaattattggtgatggcctggatacagttttgtatgaattgaaaaactaaacggaataagagaaggagaaaaacaggttttaaaggactaagaattgggaggacctaggacatctaattagagagtgccaaaggaggtgcagcatagccttgcccgcaaaaattatttatttactttaagagttaagagtggcggtttggggatagcaccaggagatatcagctgtgatggcttggagaaacagtgtaaactggcagtgtaaacaagagcagggcacgtatgagtagttgagaatggtgaataggagtacgactagacaggagatagtagggatgacaagttttttggggcacagtccaagttggtctggtgtctggaatgagactggggcctaataaaaaggagcgtctatacaggagctcaaatgggctgtaccttgtagcattccaaggacaggcctgaattctgagaagggaaagtggtaaaagtattgtccagtcctttttaagttggtggctgagcttggtgaggtatgtttttaaaagaccattagtccgttctacctttcctgaagactgaggactgtaagggatataaaggtttcactgaatactaagaacctgaaaaaacgcttggctgatttgatgaataaaggccggtctgctattggactatatagaggtgggaaggccaaaccgaggaattatgtctgacagaagggaagaaatgaccatggtggccttcttagaccttgtgggaaaggcctctacctatccagtgaaagtgtctacctaaaccaagaggtattttagtttcctgactcagggcatgttgagtaaagctaatttgccagtcctgggtggaggcaaatccctgagcttgatgtgtagggaagggagggggcctgaataatccctgaggagcagtagaatagcagatggaacactgagaagttatttccttgaggatagatttccacgatggaaaggaaatgagaggttctaagaggcgggctagcggcttgtactatagcacagcctgcctttgctggtgtgtggcgattacgcctggtggaactgccatccataaaccaagtgtgatcagggtgagaagcagggaagaaggaaatgtggggaaatggggtgaacgtcaggtggatcagagagatgcagtcatgggggtcaggtgtgtatccggaataatgtgggaggccggattgaagtccgggccaggaacaatggtaattgtgggagactcaacaaagagtgagtacagctgaaggagccggggagcagaaagtatatatgtcaggtgtgaggaagaaaatagattttggaagttatgagagctgtagagagtgagttgagcatagtttgtgattttaagggcttctaaaagtattaaggcagcagcagccactgcacggagacatgatggccagcctgaaacagtaaggtcaagttgtttggacaaaaagtctacaggatgtgatcctggtccctgtgtaagaattctgattgcacagccctgcacttcagctgtgtgtaatgaaaagggttgggatgagtcagggagagctagaatgggggcagtctctaaagctgtcttcaaggaacggaaagaggagtggggaaaggatttaggatctttggggtcagctacgtttccttttgtgagtttatagaatggtttttttaggatggcaaaaccaggtatctaaaggtgaaagtatctaaccgtgcctaggaaggaaaggagttgttgttttgtagaaggtgctggggtttgagagatcagtcggacactatcggcagggagagcacgtgtgtctttatgagaattatgctaagataggtaacaggtaaggaagaaatttgggcttgactaaagtaatgggggctgtctgtgaagctttggggcagtacagcccaggtaatttgctgagcctgatgggtgtcagggtcagtccaagtgaaagtgaaaagaggctgggatgaagggtgcaaaggaatagtaaagaaagcatgtttgagatccagaacacaataatggattatggagtgaggtattgaggataggagagtatatgggtttgacaccatggggtggataggcaaaacaatgtggttgataaggcatagatcctgaactaacttgtaaggcttgtctggttttaggacaagtgaaatgggggaattgtaaggagagtttataggctttaaaaggccatgctgtagcaggagagtgataacaggctttagtcttttcaaagcatgctgtgggatgggatattggcgttgagcggggtaagggtgattaggtttcaatgagatggtaaggggtgcatgatcggtcaccaaggagggagtagaggtatcttatacttgtgggttaaggtagggggatacaagaggaggacgcaaaggaggctttggattgggaagaagggcagtaatgaggtgtggctgtagcccaggaatagtcagggaagcagataatttagttaaagtgtctcggcctaataagggaactgggcaggtggggataactaaaaaggagtgcttaaaagagtattgtctaagttggcaccagagttggggagttttaagagatttagaagcctggccgtcaatacccacaacagttatggaggcaagggaaacaggcctttgtaaagaaggtaatgtggagtgggtagcctccgtattgattaagaaggggatgggcttaccttccactgtgagagttactggcagctcggcgtccgtgatggtctagggggcttccgaggtgatcgggcagtgtcagtcttcagctgctaagccgagaagatctgggaaggagtcagtcagagagccttgggccggagttccaggggctctgggagtggctgccaggtgagttgaacagtctgattttcagtggggtcccgcatagacaggacacggcttaggaggaatcccaggctgcgagcattccttggcctggtggccagatttctggcacttgtagcaagctcctgggggaggcagttctggaggaatgcctggccgctgcagttcaggtatttggaagttcttgtgtgctggagatgtggctggggtttgtctcacagtggaggcaaggaattgcaactcagaaatacattgttacttggctgcctctattctattattgtacaccttgaaggcgaggttaattaaatcctgttgtggggttaaagggccggaatttaatttttggagttttatttaatgttgggagcagattgggtaataaaatttatattgagaataagacggcccttttgaccttttagggtctagggctgtaaagtgtctcagggttgctgccaaacgagtcatgaactgggctgggtttttatatttgatgaaaaagagcctaaacactatctgatttggaataaagaaaaaggagcgttaaccttgactatgcctttagctctccagccacctttttaagagtaaattgctgggcaggtaggggagggctagtcatggaacaaaactgtaagccggcctgggtgtgaggaggggaggtgatataagtattatatggtggaggagcggaggctgaggaagaattgggacctagctcagcctggtgaggaggggagaggtcagatgggtctgtagaaaaggaagattagaaagactcagcgacgcttggggttgggactgaggggacaggcgggagggaaagaaggaagatttgggatgagttgcactgggaacacagactgggggggactgatgtgtaaaagaatgcctggacgtcaggcacctcagaccgtttgcctattttacgaaaagaattatttagattttgtaggatggaaaaattgaaagtgccattttctggctatttggaaccactgtcaagtttgtattggggtcaagcggcattgcagaagaaaataaggcatttaggttttaggtcaggtgcgagttaaagaggttttaggtttttgagaacacaggctaagggagaagaagggggaatggagggtggaaggttgcccatagtgaaggaggcaagtttaaagagaagggtagagacacggagggaaggggttcgggtgtttttaccctccagaaaagcgagaaaggggttggggcgtggaagtaaggggttggggcacagagataagtggtcagggtgcagaaataagggattggggtgcagagataaggggtcggggcatggaaataagggatcggggcacagagataagaggtcggggtgcagaaataagggatcagggcgcagagataaggggttggggcatggaaataaggggtaggggcacagagataagaggttggggtgcagaaataagggatcagggcgcagagataagaggtcggggtgcagaaataagagattgaggcacagagataagaggtcagggtgtggaaataagggatcagggcgcagagataagaggtcggggttcctgcccctcccccagaaaagcgggacttgccgctaagggtgaaggaccaaggcaggcatccctgcgtggtctgacacctttgaaacatgggtgaataatcagagaggcgtccctgcaatgattaaacaccaagggaaggctgccttccctagtccgtgaccagtgccggagttttgggtccatggataaaacatgtctcctttgtctctaccagaaaatgaaaggaattgaaattaagagaagggagaaattgaagtgtggtgccaagattgaaaggagaaagaggttgagggatagcgagagaggttcgagaagacagtaaaaagaggccgcttaccggatttgaaattggtgagatgtttcttgggctggtcggtctgaggacctgaggtcgtaggtggatctttctcacagagcaaagagcaggaggacaggggattgatctcccaagggaggttccccccctccagtcacagcaccaaatttcacgcacgtccgtgtgaagagaccaccaaacaggctttgtgtaagcaacaaggctgtttatttcacctgggtgcaggcaggctgagtccgaatagagagtcagtgaagggagataggggtggggccgttttataggatttgggtaggtaaaggaaaaagggggtttgttctctggtgggcaggagtgggggtcacaaggtgctcagtaggggagcttttgagccagaatgagccaggagaaggaatttcacaagataatgtcatcagttaaggcaggaacaggccatctggatgtgtatgtgcaggtcacaggggatatgatggcttagcttaggctcagaggactgacagttgtcttatctctgagtgagtgataaagtcgaagtaactgagacaagttaaataagaactggatcagttagacagtttgtacctgcagtagttggtgtgaaggaaaggccctggactgagcctgtaatgattgggtccagccttccagaagctcctgtccccatggagaaacggttcccttattaactggtgagagacaataattacaggcttgaaaaggatctgggggagtgaagcttggaaaacagaagataccctagtttcattgtgattttcctatgtctgatctctaatgggtcatgccaggcctgattagaaacccagcaggttggggagccatggacaagaattcctgatttctcatgttgtcctttggagaagctgtttccaattgcagtttgacaggagttgtggaggcccccacagccataatccttgcagtttgtatgacttcagcagtcttgcatgtgtactctgttttccacagcagtggcaaaactggctgtgaaatcagcttattcctccaaagccgtaaagcctccttttaaagaacactatttgaaggcatagttgcattgcaaaggggaggagagggctagcggctggagttaaaattcttagagggataactaacaaatccattttcaactctatttaatcagcgtttagcatttaatgcatttgattgttactaaggcgacagattcttggatactttacaaatgaaattgcagatgttcatgtgcctccaaaaatttcttttaaatcttgtaacagagattgtgagtttgttccttcaattccttacacatggaaaactctcagtaagtaactttaaatatgcaaagaatacaaaatttggaaaacaaaccaccctgttttgggtagcaagttacaaaataatgtattaatcatttttggtctccatgaattttcatggcagactgaaaagaaggtgattatacttttaaaatagcatttttggtaatagtcacatcttattttttctaaacaataaggtcattgcatttgatgaatgagaaccttccactatttgcttttgctcttgaatgccttaaaataaaaatatcactataatttcaaaactctagcttatatggaccctgcttagcaggcatcctgctgcttgagaacaaggcttggcactgaaacttatctagttcctataaaatggttgattttgtgatgagctactagcccatacattacatcagaaaatatgacaggctgacactcatcttgtcattttctttgctaacatgagaagtgccttgagaggaaattagaaggaaaatagtatgcttttgtttaatattacttaagaggacttgatcatccttaagcttttattctcttctttctaaatatcatcctggatcctggccagctcaagcatgtctgtgtgatatcttgtgctggtgagtagtcaagacgtgcggggggaactgtagcatgcagacacaaaagccagcatggagaaaccagccccttggcaacctgcccagccatctgcaactcaacaggcaggatctcttcagttcatagaatgacactttacatacactgaactgttttagctaaagagaggaacatgctaacaaacatgaggaaaccaaagcctagaccaaattcacacagtaatttcatggcaaagccaagactagaacttgagtctcttaacttgtaacacttcaccttttaaattattctttatttgagttaaggtaaaaaaattaataactagaaaaaccagaaaattagtttaaaatacttgtatggagttataaaatagtgaatattcaaaaattttcaagagttaaaatatatatatgtatacacctactgggtacccacaaaaatttcaaaaaataaaaataaatagtgaatacaggccgggcacagtggcttatgactggaatcctagcactttgggaggctgaggtgggaggatcacctgaggtcaggagattgaaaccagcctaaccaacatggcaaaaccctgtctctactaaaaatacaaaaattagctgggcgtggtggtgtgggcctgtaaccccagccacttgggaggctgaggtgggagaattgcttgaaccagagaggtggaggttgcagtgagccaagatcacaccactgcactccactccagcctgggagacagagtgagactccatctcaaaaaaaaaaaaaaaaaaaaagtgggtacataatccaattgatgagtaatcaagatcatagattaaaatgcagcataaatcttgtaacttacttttgaactttttgaaagcataagaaaatattttgtttttcttctttttttaatctcacatcacttccaagtaaagcggttagatagctaagagcacaggttctgtgtagattgaaacgtcagctctcccattcactggcaatgtgatcttgggtatattactttgttcattgcctcggtttcttcacctgtaaaatggggatcatgatattagtgcctgcattgaaggataaagcccttagaacagtgggtggcacatagtaagcacatgataaatgttagctgccattgtcatgatcaatatgatcaatattactactttagcaggttctttctaccaaactacagagagcctgggaatgagtcgttgtcgggcagttggctctcagcaagcctcttcattttgctcaggcagacagtgctgcagctgacattgtgagtccttgacttgaaacccaaggctccagtgacagttttctaagctgtcttttgccagttgactttcatgactcacattccaggtggtcatttttgacacatcctcgtagatgtcaacatgttagggaagaacacaaagtctgtaacatccaagaagcctctaagtctattctgctagtaggtaagagtgaatgtaaaactgcactttcctgaacaataatttataaaaatatcacaaagactgattgttgaaataaagtatgttagaaatgctgtcaatgtaggccaggtgcggtggctcatacctgtaatcccagcactttgggaggccaaggcaggcggatcacgaggtcaggagatcaagaccatcctggctaacacggtgaaacactgtctctactaaaaatacaaaaaaaattagccgggcatggtggagcgcacctgtagtcccagcttctcaggaggccaaggcaggagaatggcatgaacccaggaggcggagcttgcagtgagtggagattgcaccactgcactccaacctggatgacagagtgagactccatctcaaaaaaaaaaaaaaaaaaagtcaggaaagaacagatgctacttcctataggatcatcatgattaccacatttagatgttgcagtgtctctctctgttgctgatgataacagcgtgtcttttcagctcttaattttaggcaaactgacctctgatggaaaacagtatactaggatgtttaaataagtaaaacaatctcttttttttgtacttttagaatcccctatagctggtgtcctatcactatgattatgcaaaactggtctgttagcattattaaaaacatttttcttattagcatcttattttatttatttatttatttattttactttaagctctgggatacatgtgcagaacatgcaggtttgttatatatgtatacatgtgccatggtagtttgctgcacctatcaacccatcacctagtttttaagccttgcatgcattaggtatttgtcctaatgctcttcctccccttgccccccagccccgataggcctcggtgtgtgatgttcccctccctgtgtccatgtgttctcgttgttcaacttctacttacgagtgagaacaggcagtgtttggttttctgttcttgtgttagtttgctgagaatgatggtttccagcttcatccacgttcctgcaaaggacatgaactcattcttttttatggctgcatagtattccatggtgtatatgtgccacattttctttatccagtctatcattgatggacatttgggttggttccaagtctttgctattgtaaatagtgctacaataaacatatgtatgcatgtgtctttatagtagaattatttataatcctttgggtatatacccagtaatgggattgctgggtcaaatggtatttctggttctagatccttgtgaaattcaccacactgtcttccacaatggttgaactaatttacactcccaccaacagtgtaaaagcattatttctccacagcctcaccagcatctgttgtttcctaactttttaatgatcaccattctagctggtgtgagatgctatctcattgtggttttgatttgcatttctctcatgaccagtgatgatgagctctttttcaaatgtttgttggccacacagatgtcttcttttgaaaagtgtctgttcatacccttgacccactttttgatggggttgtttgtttttttcttgtaaatttgtttaagttcattgtagattctggatattagacctttgtcagatggatagattgcaaaaattttctcccattctataggtggcctgttcactctgatgctagtttcttttgctgtgcagaagctctttagtttaattagatcccatttgtcaattctggcttttgttgccattgcttttggtgttttagtcatgaagtctttgcccatgcctatgtcctgaatggtattgcctaggttttcttctagggcttttatggttttaggttttacatttaagacttcaatgcatcttgagttaatttttgtataaggtgtaaggaaggggtccagtttctgttttttgtgtatggctagccagtgtaaaacaagcttttattccagttttctttggtactccctgtttcctcaaagaggttctggctgctggcatctgtttccaacagcagacctgtcttccctgcagtcactcaggactgacttagtcacacgagggatcttccgtactccaatttattgcatattagctccagtgtgctaaagttcttgctttgtatgttttctggcaatggttttcaaaatactagttctttggaggtgctgggctacccaagtcgtttggccagcaggaagtcaaaggaggcagttgcaaatgaaagggcttaagatgagagctgcttcctgagagcacggcattgatatctgtgggattccaatcctgcctctctttcctctgtcccaaatgtggactgtgatgtcctcagaaccacagaccatgtcttgctgaagttggaaaggagggtgagggagggggaagaaccaagtacaagaaactctgacatcccttgttcccattatttttaaacgtcgtttcccaaaacgaaatgaatttttatgtaatcctgaaaggaagagatagtctcctttttattagtagagaaacagacgcacacacacagatgtcgtatatggaatctgaactttagaccggggcacaggcacagtttgtggcctgttaataaatctgcacattcacagcaggatatgagagttttattaatgtgttcttaggccagagagcttggtaaaaacaggtatagggaggccccatgctggccagcactgtccctgctagtctcccactgttttctgtggccacaccctccctgtggccatctccccacccctactacctaagtctcagaagagagttttgtgtgacacaaaagaaaccttattcctgaacactcattcagtgtgtagatgtgggtaaaagaaattagtttttcaaacattttcattttgatttatcatgtgggctttagcacctgagtgatttatgatgcagatggcttgatctgtgctctgatttgggaacagcacgcatgccgtctgtggaactctgggtgctcaaaggggctgtgttcttcaaagggtgtctccttggcacatgtgacaggcccaggaagtcctgagcaaagcagtcctgggcacgcactcttcgcgtggatccatggccaatgacctggatgcctgagctaagacatcatggaatgcctgtcctttccaatgggcctcggcctcaagattcctccatgcaactgacatacttctaggacgtcttcagtctgagcctggaaacatggtcacgtctttcaaaggaatggaactgactctgctgagtcatctagatgggttggaaacccagatccactcctcatagctctccacagaggcctgactgcaggggctaaggccagaacaggccctacatgggcagctacctgtttaatgtttggatggtagcccctaaatctacctgcatgcaagacagcatgaagaatgtggagaaagcccaggcctcaagagggccccagggtattggctgtccagaggaagagagtaatgggggagatctaagtcagcaaggctgtggcgaaagcctgaggcaagctttgcccactttgaagctttctgttgctatttgttcctgccatgtcagttgagagtgtttgtgtgtgcatgtataggtgtgtgtgtgtgtgcacatgtgtgcatgggcatgcatacacaggaggatctggggataccctgggcttccacacctgtgagggagtgagggtagctgggctgggcaaagggagaagttgaactctgatgtgggtgcaaccaaggcctccaccaaccctacagagagctctagttctgggtggcccttcagagatgacccaattgagccaaggaggctgggcctctgtatttggacattaacctgttactggatatgggctgccatctagagaggggaatttgtatatattttttcttctccttatagataagctgaacagtgttctgtttcctaggaaacctgaagctatatgttcatgttgattctatagctgtttggggagaatggtggggcggcggggggaatttgtaatcaggctaccaccattgttcttcagccccagaagtcctcaagtcatttgcaatcttaggtacttgaattgaattttttttttttttttttgagacagagtcttgctctattgcccaggccagagtgcagcagtgcgatctcagctcgctgcaacctcagcctcctgggttcaagcgattctcctgcctcagcttcctgagcagctgggactacaggtacccgccaccacacctggctgattctttgtatttttagtagagatggggtttcaccgtgttagccaggatggtctcgatctcctgacctcatgatccacacacctcagcctcccaaagtcctgggattacaggtgtgagccactgcacccggcctgaactatttttaataccaaatttcataccacataccttgcaagtgaccttgacaatatctcagttatggagagctccgcagagcagcacagaaccagatggtagcccctcagataccagtcatcaagccctaccacctcttccgtgactctgtttctgcaggctaaatacatacaattctttcgaacgtacgtgactctgtttctgcaggctaaatacatacaactctttcgaacgtacctcctaagacatgctgtggagtcttttcacctacctcatcactctcttgttctattttatccagattatttaaatgttatacctagaagtcagcacagttttctagatgtggtctgactcatacaaaatcaagcaggtctgttttctctgtttttctgaaaattctgtttctattgatgtaggttagttttccattgctgttagtcgcattatgctgttaattcatactgagcttgaaattgattaagcctccatgtcttttccacatgaactattgttaagcaacatttcctccactggggaattgtctggtgctgagagtggtttttcgtttttgttggaagttatatttctttttgttaaacttcattttgcttgatcaggttatcattccagccttttgtttaagaatgggaaagcctgacatttggtgacaggtgcttaaatatttttgatgacctgttgtttaaaaggcctattaaagccaggagtggtggtacatatttgtagtcctagctgtttgggaggctgaggcaggaggtttgcttgagctcaggaagtcaaggcttcagtgagccatgattgccccactgcacaatctagcctggaaacggaacaagaccctgtctcttaaaaaaaaaaacaaaagagggcctattaaaggaactcaggagtatgctatacaaggcagctcatgaaaacgtcctaattattttgtttgaatcagaggaggattgtaattatacttaagcctaacacacaagaagatctactactcacaccgtaaagaagatctcccaggattccagactttttgcctcagatcaacttgttactgctgtgttgctagcttgttacatgctagctatgttgactacagctaactagagtggcttgggcgttaatagaaaaatacagccaggtcccaacacagaccagttaaatctacagaggtgagatcgagacactggaatttttgacagtcctcttcttccactaaatgattctaatttgcatcctaggctgagatctacaagattaagcagagaaaaccagctgcatgtgtcttctccccactggaaaaatgtccatggtgccactccatttactgggtctattttttaaaaagcggagatcactatactcttccctacatttgtaaagtcaattggcatgacctcaacaaacattcccatcttgaaaatattacaaaattagtggacttttgtgttacattgatgttctgcactaaaagaaaaaaaaactgataaaaattcagacttgaaaataagcacattgggattcttttgtagaaaaacagaattctttaaatagcacatttttctggagaatttaaaaacatgatttattttataaaatgattatttttaaagaaccatttattatataaagtgagacatacttgcaattttatgttgcctttctggactgaaaagttacttgtgaaatatagagactaaggaagtcaaagttatttgaaagcatggaattttagaagttgaaagacccttaggcaaccctctgctgcaactttttcttttcacaaagagtagcaatccagagagggtttgtggtctaacagacaaccatgctctccaaagtgcagtctgaccatcagcccaggtacagtccagggactgctagaaatacaatatctcaggccccaccagtgacctccagcatgagaatctgtagtttaccaagaaccctaggtgatttgcgagcatgttacagtttgggaagcactggtctagaaaattcatattccagacaactgaaaggaaaacggccacgcgtagccagagttcacagaactcaatttaaatttaatgcaactgccttgaggagggaaaaaaggggaaaaaactcaatttgtttttttctgtgaccttgtcaacttggataattagaacctatataacaaaaaggaatgtactttgctagtagttcagaaaattgaactgactgaatgtatttttttcatacagtgaaagctaaaaatttgctttcaaaacagcataaaatgcttattatatagctctttgtttcattgccaactgcggatttagacatggagtcattcaaagagcagtgggacattatgagtaattcacaatcttctgggcttttgacatttctgcaaagccacagattcccaagcacagcatttagttacagcacttcaaaaacacagcactatgattttatggaagctgtagtacagatgtcattcccagaggtgtaaggaaatgctgtgggcaaagattgttcatttagttcaaatgagcattttatcttattaacattagaatgtattttttttctcattgtcaagttttttgtttttgtttttgttttcttttggtcattctttttttttttgagacggagtctcgctctgtcgtccaggctggagtgcagtggcgtgatctcggctcactgcaagctccgcctcccgggttcacgccattctcctgcctcagcctcccgagtacctgggactacaggcgccccccaccacaactggctaactttttgtatttttagtagagacagggttccaccgtgttagccaggatggtctcgatctcctgacctcgtgatccgcccacctctgcctcccaaagtgctgggattacaggtgtgagccaccgcgcccggcttttttggtcattcttgcaatcatttttgaggaatacagatgaagcccaagtgaattatgtataagcatatatatatataaatatataaaaaaaaatacaccaaaagtaaagccaaaagtgtagacatccggatttgactttaaatttattgtgctcaccttttcttttggtggagattaaagtggtgggaatttgtgtattaattgagtgatgctggttgtgttacacatattgtacaatacggggtgatggctgtggataagtatgtttatttaagaaacacagatggtgaagcttttccgtgctgtgtcatgtgaggatcaactgaaggatgggggaatgtttagctggaagaggagttcattatctttaaatgtttggaaaattaaccaatgtttgaagggagtacacagacttcttttgcctggtacaaaggggtagaacttggaggaatgcgtgggcgctccagggaggcagagatcagccccaaatatgaaaggaagcagatagtgaatgactgcagagacacaggcaggggtgtgcgtcttctgctagggttgttgtaaagagcctatcaccatcaaatagaaactggattagaagacacttaaaggtccctttcaaacctgtaggtctacagatactgctgtttcttacgtaataccccttccacatcgcagtgctactccgatagcctccagagtttccctcctggactgtgacctcggcctcccaagtatgccagctgggctccttccagccatttccacacagtggcagagagcactgctatagaaaccagctcccccggtgcagaagctcactgaggacaaacaccttgtctgttttctcactgatacactgcaaacacccaaaacagtgctataaagtggcttctagttgggtttagaaatgaatttgaatttctgaccatgacctgtgaaattcattatctgatctgtgcttatttgaggcctcacctggggtcaggccctgcctttctcagcattcattagctgtgctgtccttgctaatccccgagcatgcaaggctctcacatcgcagggcctctgcccacgttgtttcttcttgaaaggtttattccactcttctccggctactcctgttaaactataggttacaacttgagttcatttccttaaggccttcctggcatcagcctcatctaagtgagattcctctatttaaatatcatagtattctctacttcctaacatgcatcaaacctgtaacgatgtatttcttattgtgtgtttgattctgtagcattcagttctttcaatagattgtaagttatttgagaacagaccattatatctccaatgtcttgcacagggcacagggtattaaaaggattttttgaactggtggttctcaactggagcagttttggccttcaaggatatttgacaatctgtggagacatttttgtctgtcacaagtgggaggtgccactagtatgatacagataactggaggtgcttactgctagacgtcccacaatgggcagcaaggtcccggaatcacctggcccaaaatatccacagtgccgaggttgtgaaccttggggtgaatgaatgaactgtctgtcttttggttgattgtcctttgtggcaaggtgtttttcccaaattattcattgctttcccactgccagtgtcttctcatccaggggaaactttgatttatgcaggaacagccaaacacatgattccttgagaaaccaagctctccaaaattagctggttagtatttctttacatggaaatattggcatttaaaattattcaaatgataatggttttgaaagaaaacagttgccagccatttccttttgagataaggcaactgcattgaaaagttttgatggatggagaaaatgagattgtagcaaatttgtcagttgtaatcccaatctgagaaaacatttactctgatagcactctgcactataaccttcagttccttcactgttatgtaccatgagggctgggaaggacacaccaggggaggccgttttgactctgccaaacagtggttcctcattcattctaattcacttagtgacgtggctctctcattgcttttttcaccacctgacctctttaccttctgagtctaactcagtaaaactgttcccatcctgggggtggccaccttcacctgtctctcggcaggaagcacagaatctgagtttgagctacacaactttttgtttctagctcaagccatcatatttatgaggaagacttgttagaagaaaatgaatgacagtttctacctattgaaaaatttcattcggctttgtagtcagagtctgggacagtacttcccaatcttcatcacttcatcgtacccgagagattgatgtttgtgcagcacacaagggtaaactgaggtgggcctcaaagcaggagaagacagtacaagtaatccaggcacctggggctctggtagcttcaggctctgccttgctaccccaaggcctgagaggattaatgtctcagcataacttttaaccctttcctggcacatccgttgggaatttctggtatagaatagcctcacgtaatggccactcatctatgggccaatagatgataatgttattcatttccacttaatatgggctgatagattggcattgcctaagaacaagtcatattttgtttatccctggagaagcacagatgagatacttttaaaattttccttattcggaattcttgccaacaatagcactttcgctcctccgagacagggatgcagcgctgtccagcaggaaccatctgaagtagccatcacaaggcctgctgcagaggaccgtatgtcagaagaggtctctcaggaccaaaacatacgcagctgtgtcatggagggccagccagtggggcacacacccctcggctgactactgtgttcccttaccctgaggtcacgggtgtgggcttgccaacccgtgtcagctcagaatctggagcctggccacagagatctgatatagcttggacattgctgaagacagcatttggagagctgaagagtgcagggacccgtatcaaaggacccaattgagtgtaacaggctggaaatgaagtacctcataaaaggcagggattggggataatttttaggattttgttttcagcaactgagtgggtgggagtaccatttgctaaattatggaaggccagagaaaaaggtggtgttaaggggaggagactagagtttaaagactgttagacagctgagggattttctagctattgagtttttgagtttgaagcctgaaagaggcccacacgggggatataaacttgggagtcatctacagttatacagtattcaattaatgctatggtattagattaattcattcactctttcaacacatatatccagagtgcctactatgtactaaatgagatcacctacgagaacccagagaagacagatggtatattccagtatattcctactcattttattctctctccctctctttccctgcagagatggccactgtcttgaagctggtatccttcctctcatgcctctgtatatttattatgtctggatatagttacgggcattagagtattattttctgtattttaaaactttatgtaagtgatatgagctgatatataaatgtgtagcttttttcactcattataagactattcatattgatgtatgtctccttgtgaacatgtgtgtgaatttctccataaatggaattgttaggtcaaatttattttattttttatttttcactatctcaaaggaactcattttaatttttttattatgcaacatttagtttattaattgaatatgaaatttttgatgtgtatatagctgatgagcttttttttctttttcaactttttttaaaataaagaaaataggtttaattgactcacagttctgcaggctgtacaggtaacatgactggggaggcctcaggaaacaatcatagcagaaggcaaagggaaagcaggcacttcttacatggctggagtaggaggaagagagcgaagtgggaggtgctacacacttttaaacaaccagatctcgtaagaactcactcactgtcacaagaatagcaaggggtaaatccacccccttgatccagtcacctcccaccaggcccctcctccaacattcagaattacggtcaacatgagatttaggtggggacacaaatcccaaaccatatcattctgcccctgacctctcccacatctcatgtccttctcacattgcaaaatacaattatcccatctcaaaagtccctcaaagtctcaactcattttagcattaactcaaaagtccaaagtccaaagtcttatcagaaacaagctagtctcttctgcctatgagcctgtaaaataaaacagcaattaattagttccaagacacaatgggggtataggtattgggtaaatactccctttccaaaagggacaaatcagccaaaacaaagtgggctacaggccccatggaagtctgaagcccagcagggggtcattaaatcttatagctacaaaataatctgctttgactccatgtctcacattcagacgacactgatactaggggtgggctcctaaggccctgggcagctctggccctgtggctctgcagtgtacatcaccagcggctgctctcaagggctggtgttgcgtgcctgtggcttttccgggtgcatagtgcaagctgtcaataaatctaccattttggggtctgggggactgtggccctcttctcgcagctccactcagtagtgccctggtaggaactctgtgtgggggctccagccctacatttcccctctgcactgccttagtggaggttcttcatgagtgctccaccccttcggcagatttctgcctggatgtctaggcatttccgtacatcctctgaaatctaggcggaggctcccaagcctcactcttgccctctgtgcacccacaggcttaactatatggaagccgccaaggtttttggcttgcaccctctggaacagtggcctgagacatatctggggcccttttagccatggctggagctaaagcagctgggaaaatgccttggaggcatttttccccattgtcttggctattaacatttagctcctctttatgcaaatttctgcagccagcttgaattcctccccagaaagtgggtttttcttttctaccacatggtcaggctgcaaattttcttgcaaacttttgtgctctgctccccttctaaatataaattccagtttcagaacatctcttggttcatgcagatgagcatatgctgtcataagcagccaggtcacttcttgaacgcattgctgcttaaaaatttcttctaccagataccctaaatcatctcactcaagttcaaaattccacagatccctagagcaggggcataatgccagtcagtctctttgctaaagcaaggaaagagtgacctttactccagttcccagaaagttcttcatctccatctgagacctcctcagcttggacttcactgtccctatcactatgagcattttggtcacaaccattcaacaagtctctaggaaattccaaactttccctcactttcctgtcatcttctgagccctttaaactgttccaacctcttcccattacccagtttcaaagctgctttcacattttcaggtatctttatagcaagggcccactgctggtaccaagtttctgtattagtcagttctggcactgctgtaaagaaatatctggccaggcatggtggctcacacctgtaatcccagcactttgggaggccaaggcagacaaatcacctgaggtcaggagttcaagaccagcctgaccaacgtggagaaaccccatctccactagaaatacaaaattagctgagcatggtggtgcatacctgtaatccaagctacctgagaggctgaggcaggaggatcacttaaactcgggaggtggaggttgtggtgagccgagatggtgccattgcactccagcctgggcaacaagagcaaaactccacctcaaaaaaaaaaaaaaagaaagaaagaaatatgagactgagtaatttatggagaaaaaaatttaattaactcatggttctgcaggctgtacaggtaacatcgtgggggaggcctcaggaaactttcaatcatggtggaaggtgaagaggaagcaggcacatcttacatggctggagtagggggaagaggagctctttttcaacttttgttttaggttcagggggcacatgtacaggtttgttacttgggtaaattgcatgttgctggggtttggtgtacaaatgattttgtcacccaggtagtgagcatagtacctgataggtagttttttgatcctcacctttcccctaccctccgccctcaagtaggacctagtgtctgttgtacccctctttgtgtccatgtgtgttgtaagtgagaacatacagtacttggttttctgctcctgcattaatttacttgggataatggcctccagctgcatccatgttgttccaaaggacatgattttgttcttttttatggctgtatagcatttcacagtgtatatgtaccacatttcccttatccagtccactactgatgggcacctaggttgattccatgtttttgctattgtgaatagtgctatgatgaacatatgagtgcatatgtctttttggtagaacaatttatatttctttgggtatatacccagtaataggattgctgggttgaatggaagttctgttttaagttctttgagaaatctccaaaatgctttccacagtggccaaactaattcacattcccaccagtagtttataagcattcctttttctccatcacattgccaaaatctgttattttcttttttttttaacattttttttttattatactttaagttttagggtacatgtgcacaatgtgcaggttagttacatatgtatacatgtgccatgctggtgtgctgcacccactaactcgtcatctagcattaggtatatctccggatactatccctcccccctcccccccaccccacaacagtccccagagtgtgatattccccttcctgtgtccatgtgatctcattgttcaattcccacctgtgagtgagaatatgcggtgtttggttttttgttcttgcgatagtttactgagaatgatgatttccaatttcatccatgtccctgcaaaggacatgaactcatcattttttatggctgcatagtattccatggtgtatatgtgccacattttcttaatccagtctatcattgttggacatttgggttggttccaagtctttgctattgtgaataatgccgcaataaacatacgtgtgcatgtgtctttatagcagcatgatttatagtcctttgggtatatacccagtaatgggatggctgggtcaaatggtatttccagttctagatccctgaggaatcgccacactgacttccacaatggttgaactagtttacagtcccaccaacagtgtaaaagtgttcctatttctccacatcctctccagcacctgttgtttcctgactttttaatgatcgccattctaactggtgtgagatggtatctcattgtggttttgatttgcatttctctgatggccagtgatgatgagcatttttacatgtgttttttggctgcataaatgtcttcttttgagaagtgtctgttcatgtccttcgcccactttttgatggggttgtttgtttttttcttgtaaatttgtttgagttcattgtagattctggatattagccctttgtcagatgagtaggttgcgaaaattttctcccattttgtaggttgcctgttcactctgatggtagtttcttttgctgtgcagaagctctttagtttaattagatcccatttgtcaattttggcttttgctgccattgcttttggtgttttagacatgaagtccttgcccatgcctatgtcctgaatggtaatgcctaggttttcttctagggtttttatggttttaggtctaacgtttaagtctttaatccatcttgaattgatttttgtataaggtgtaaggaagggatccagtttcagctttctacatatggctagccagttttcccaccaccatttattaaatagggaatcctttccccattgcttgtttttctcaggtttgtcaaagatcagatagttgtagatacgcggcattatttctgagggctctgttctgttacattgatctatatctctgttttggtaccagtaccatgctgttttggttactgtagccttgtcgtatagtttgaagtcaggtagcatgatgcctccagctttgttcttttggcttaggattgacttggcgatgcgggctcttttttggttccatatgaactttaaagtagttttttccaattctgtgaagaaagtcattggtagcttgatggggatggcattgaatctataaattaccttgggcagtgtggccattttcacgatattgtttcttcctacccatgagcatggaatgttcttccatttgtttgtatcctcttttacttccttgagcagtggtttgtagttctccttgaagaggtccttcacatcccttgtaagttggattcctaggtatttgattctctttgaagcaattgtgaatgggagttcactcatgatttggctctctgtttgtctgttattggtgtataagaatgcttgtgatttttgtacattgattttgtatcctgagactttgctgaagttgcttatcagcttaaggagattttgggctgagacaatggggttttctagatatacaatcatgttgtctgcaaacatggtcaatttgacttcctcttttcctaattgaataccctttatttccttctcctgcctaattgccctggccagaacttccaacactatgttgaataggagtggtgagagagggcatccctgtcttgtgccagttttcaaagggaatgcttccagtttttgcccattcagtatgatattggctgtgggtttgtcatagatagctcttattattttgaaatacgtcccatcaatacctaatttattgagagtttttagcatgaagggttgttgaattttgtcaaaggctttttctgcatctattgagacaatcatgtggtttttgtctctggttctgtttatatgctggattacatttattgatttgcgtatattgaaccagccttgcatcccagagatgaagcccacttgatcatggtggataagctttttgatgtgctgctggattcgttttgccagtattttattgaggatttttgcatcaatgttcatcaaggatattggtctaaaattctctttttttgttgtgtctctgcctggctttggtattagaatgatgctggcctcataaaatgagttagggaggattccctctttttctattgattggaatagtttcagaaggaatggtaccagttcctccttgtacctctggtagaattcagctgtgaatccatctggtcctggacactttttggttggtaagctattgattattgccacaatttcagatcctgttattggtctattcagagattcaacttcttcctggtttagtcttgggagagtgttatgtgtccaggaatttatccatttcttctagactttctagtttatttgcgtagaggtgtttgtagtattctctgatggtagtttgtatttctgtgggatcggtggtgatatcccctttatcattttttattgcgtctatttgattcttctctctttttttctttattagtcttgctagcggtctatcaattttgttgatcctttcaaaaaaccagctcctggattcattaattttttgaagggtttttgtgtctctatttccttcagttctgctctgattttagttatttcttgccttctgctagcttttgaatgtgtttgctcttgcttttctagttcttttaattgtgatgttagggtgtcaattttggatctttcctgctttctcttgtgggcatttagtgctataaatttccctctacacatgctttgaatgcgtcccagagattctggtatgttgtgtctttgttctcgttggtttcaaagaacatctttatttctgccttcatttcgttatgtacccagtagtcattcaggagcaggttgttcagtttccatgtagttgagtggtttggagtgagattcttaatcctgagttctagtttgattgcactgtggtctgagagatagtttgttataatttctattcttttacatttgctgaggagagctttacttcccagtatgtgctcaattttggaataggtgtggtgtggtgctgaaaaaaatgtatattctgttgatttggggtggagagttctgtagatgtctattaggtctgcttggtgcagagctgagttcaattcctgggtatccttgttgactttctgtctcgttgatctgtctaatgttgacagtggggtattaaagtctcccattattaatgtgtgggagtctaagtctctttgtaggtcactcaggacttgctttatgaatctgggtgctcctgtattgggtgcatatatatttaggatagttagctcttcttgttgaattgatccctttaccattatgtaatggccttctttgtctcttttgatctttgttggtttaaagtctgttttatcagagactaggattgcaacccctgcctttttttgttttccattggcttggtagatcttcctccatccttttattttgagcctatgtgtgtctctgcacgtgagatgggtttcctgaatatagcacactgatgggtcttgactctttatccaatttgccagtctgtgtcttttaattggagcatttagtccatttacatttaaagttagtattgttatgtgtgaatttgatcctgtcattatgatgttagctggtgattttgctcgttagttgatgcagtttcttcctagtctcgatggtctttacaatttggcacgattttgcagtggctggtactggttgttcctttccatgtttagtgcttccttcaggagctcttgtaaggcaggcctggtggtgacaaaatctctcagcatttgcttgtctgtatagtattttatttctccttcacttatgaagcttagtttggctggatatgaaattctgggttgaaaattcttttctttaagaatgttgaatattggcccccactctcttctggcttgtagggtttctgccgagagatctgctgttagtctgatgggcttccctttgagggtaacccgacctttctctctggctgcccttaacattttttccttgatttcaactttggtgaatctgacagttatgtgtcttggagttgctcttctcgaggagtatctttgtggcgttctctgtatttcctgaatctgaacgttggcctgccttgctagattggggaagttctcctggataatatcctgcagagtgttttccaacttggttccattttccccatcactttcaggtacaccaatcagacgtagatttggtcttttcacatagtcccatatttcttggaggctttgctcatttctttttattcttttttctctaaacttcccttctcgcttcatttcattcatttcatcttccatccctgataccctttcttccagttgatcgcatcggcttctgaggcttctgcattcttcacgtagttctcgggccttggttttcagctccatcagctcctttaagcccttctctgtattggttattctagttacacattcttctaaatttttttcaaagttttcaacttctttgcctttggtttgaatgtcctcccgtagctcagagtaatttgatcgtctgaagccttcttctctcagctcgtcaaagtcattctccatccagctttgttccgttgctggtgaggaactgcattcctttggaggaggagaggtgctctgcgttttagagtttccagtttttgtgttctgttttttccccatctttgtggttttatctacttttggtctttgatgatggtgatgtacagatgggttttcggtgtggatgtcctttctgtttgttagttttccttctaacagagaggaccctcagctgcaggtctgttggaataccctgctgtgtgaggtgtcagtgtgcccttgctggggggtgcctctcagttaggctgcccaggggtcaggggtcagggacctacttgaggaggcagtctgcccgttctcagatctccagctgcgtgctgggagaaccactgctctcttcaaagctgtcagacagggacatttaagtctgcagaggttactgctgtctttttgtttggctgtgccctgcccccagaggtggagcctacagaggcaggcaggcctccttgagctgtggtgggctccacccagttcgagcttccaggctgctttatttacctaagcaagcctgggcaatggcgggcgcccctcccccagcctcgctgctgccttgcagtttgatctcagactgctgtgctagcaatcagcgagactccgtggggtaggaccctcagagccaggtgtgggatataatctcgtggtgcgccattttttaagcccgtcggaaaagcgcagtattagggtgggagtgacccgattttccaggtgcgtccgtcacccctttctttgactcggaaagggaactccccgaccccttgctcttcccaagtgaggcaatgcctcgccctgcttcggctcacgcacggtgcacgcacccactgacctgcgcccactgtctggcactccctagtgagatgaacctggtacctcagatggaaatgcagaaatcacccatcttctgcgtcgctcacgctgggagctgtagaccagagctgttcctattcggacatcttggctcctccactattttctttttattcatagccgttctgactggtgtgaaatggtatctcttggcagttttgatttgcatttctgtaattattagtgattttgaatattttttcatatgcttgttggctgcatgtacgttttcttttgagaaatatctgttcttgtcttttgcccgttttttaatgtggttggttgttttttgcttgttgatttgtagaatccttatagattttggatattagacccttttcagattcatcctggctctgtgtcttcactcaaatctcatctcaaattgtaatgcccgtaatccccacatgttgagggagggaccagttgggaagtgattggaccatgggagcagtttgccctatgctgttctcgtgatagtgagttctcatgagatctgatggttttataaggggctcttcctcctttattgctcactcttctctctcctgctgccatgtgaagaaggtccttgcttctccttatgccacgattgtaagtttcctgaggcctccccagccatgtggaactatgagtcaattaaacttctttcctttacaaattacccagtcttgggtagtatcgttatagcagtgtgaaaacggactaatacacagtttgcaaatatttactcccattctgtagcttgccagctatcccagcactgtttactgaatagggagtctgctccccatcgcttgtttttgtcaactttgttgaaggtcagatggttgtgagtgtgcccccttatttctggctctttaatctgttccattgtttctgtgtctgcttttgtaccagtaccattctgtttgggttctgtagccttacagtgtagtttgaactcaggaagtgtgatgcctctggctttgttcattttgcttaggattactttggctatttgggggctcttttttggttctgtatgaattttataatttttctaattctgtgaaaaattacattggtagtttgataagaatggtattgaatctataagttgctttgggtagtatggccattttaacaatattgacttttcctatccatgaatatggaacatttttccatttgtttttgtcatctgtgatttttttccagtggtgtttttgttttacttcaagttgcaggatacagatgcagaacatgtaggtttgctacataggtatatgtgtgtcatggtggtttgctgcacctatcaacccattatctcagttttaagccccacatacattaggtatttgtccgaatgctccctcccctccctcactccctgccccccgacaggccctggtgtgtgtttttcacctccctatgtccgtgtgttctcattgttcaactctcacttatgagtgagaacatgcagtgtttggttttctgttcctgtgttagtttgctgaggatgatggcttccagcttcatccattccctacaaaggacatggtctcattcctttttataactgcatagtattccatggtgtatgtgtactacattttctttatctaatctatcattgatgggcatttgggtgttccaactctttgctattgtgaagagtgctacaataaacatacatgtgcatgtgtctttatagtagaatgatttatatctctttgggtatatgcccagtaatgagattggtgggtcaaatggtatttctggttctagttctttgaggaattgccacactgtttcccacaatggttgaacttgcattcccaatgcaagtttaatttgcattcccaataacagtataaaagcattcctgtttctccacagcctcaccaggatttattgcttcttgactttttaataatccccattctgactggtgtgagatggtatctcattgtgattttgatttgcagttctctaatgatcagtgatgttgaactttttctcatatgtttgttggatgcataaatgtcttcttttgagaagtgtctgttcatatcctttacccactttttgtttttttcttgtaaatttgtttaagttcattgtaggttctggatattagccctttgccagatgggtagattgcaaaaattttctcccattctgtaggttgcctgttaactctcgttatagtttcttttgctgtgcagaagctctttagtttaattagatcccatttgtcaattttggcttttgttgcaattgcttttggtgtcttagtcatgaagtctgcccatgcctatgtcctgaatggtattgcccaggttttcttccagggttttttttttttaatcattttgggttttacatttaaggcttcaatccatctttagttaatttttgtataaggtgtaaagaaggggtccagtttcagtagtttgcatatggctggccagttttcccagcaccatttattaaatagggaatcctttccccactgcttgtttttgtctggtttgtcaaagatcagatggttgtagatgtgtggtattatttctgaggtctctgttctgttctgttggtctatatgcctgttttggtaccagtaccgtgctgttttggtttttgtagccttgtagtataacttgaactcaggtagcatgattcctccagctttgttctttttgcttaggattgtcttggctatataggctcttttttggttccacatgaaatttaaagtagatttttctaattctgtgaagaatgtcaatggtagtttaatgggaatagcattgaatctgtaaattactttgggcagtatggccattttcatggtattgattcttcctgtcatgaacatggaatgtttttccatttgtttgtgttttctcttatttccttgaggagtggtttgtagttctccttgaagagggccttcacatcccttgttagctatattcctagatattttattctctttgtagcaattgtgaatgacagttcattcatgatttggctctctgattctctggtgtttctgtcaggttttggtatcagaatgatgctgacatcatagaatgagtttgggagaagtccctcctccttgattttttggaatagtttcagtaggattggtaccagctcttcttcatacatctggtagaatttggctgtgaatccatctgttccaggtatttttctggttggcaggtgttttattactattactatttcaatttcagaatttgctgttggtctatttatgatttcagtttcttcctgattcaattttgggaggttatatgtttccaggaatgtgtccatttcttctaggttttctagttcatgtgcatagaggtgtttataatagtctgtaagggtttttttttttttcttgtatttctgtggggttggtggttaggttaaatttactagatgctgccaacctatttttctaaccaaatgtatgagtgtttctttttccccacatgctcaccaactttttttacaatattatcagactattcaatatttactaggttaatgcacatgagattttatcttattatttgaatttgcattttactgattactaagattgagcatatagtatagtatagtatagtatagtatagtatagtatagtatagtatagtcgtcagttgtgttgacttttttgtaaattgcctgttcatgtcctttgcctgcttttctatcacattcggtttcttccttcttaatggtgcatatgagttatttgagctctttgtgtatcttgaatattaagatttgaaacaaacttcatttcaattttaatacaaattttgtgggcttaatcctctgtcttgctatgattattccttgaatgttgctttacttaaaatcccagagaatttttattttcaaaatgtttttgcagatctttgcctggttagagttgtgggactttcaagctgtgaatgtaaagctgtttttaaaggatgtaaaatatggcaatttggagaatatgttaaacaacagttttaatccccaatgcaaattatgttgatataatcaaatcattttctgcatccatcacaatttgttgatcaccacacagtctggcacatttttaatttattttgggttatatggatagtatgaaaaaaatctatgcatttttatcaaaagtcacatggtataatctgggctctgctgccactaagctgtatcactctacagggtgggactgagccctgtagctttcatctcatctggaaaatgaatgtcagaccagatactctccggagtctgtctaacatgaaaacttaatttttctcttaaaagctaattttaaaagccacagatttttacaaaatgaaatcatctcttaaggaattagatccattgatagtagcaagaaataattagtgaaaaatagaacatattctattttacactggttagttgggagagtataaaaagcaacttttgtgtctggctctgaaattcaagaagaggtattctgtatacgtggaacagctacaaaaattggctctatttttcttctataaatcagggaaccatggctaaactgatcttaaggtcatgttttaagcaacttggattcaaacttcacaggacttaaaagactttagggcaccccttataaatttgaaaaagaacaaagctgaagtactcaaacttcctgatttccaaacttactacaaatcttcagtaatcaagacagtgtggtaccggcataaagacaaacataaagaccatggtatagaatagagaaataaaccctcacatatgtatggtcaaataatttttgataagggtgccaagaccattcaatggggagtcttttcgacaaatggtgctgggaaaactgaatatccacatgcaaaagaatgaagttggacccttacctaacaccatacacaaaaattaacttgaattcaagcaaagacctaaaactatagaagaaaacatagggcaaataatttattggatatgacactaaaggcacagacaataaatgaaaaaatgggcaaatttgacttcatgaaaatttaaaactttggggcatcaaaagacaccatcaacagagttaaaggtaacccacaaaatgagagaaaatatttgcaaatcatatatctgataagggattcataaactgaatgtattgagaacttctgaaactcagcagcaacaaaactccaaatgacctgggttcaaaattgggcaaaggacttgaatagacctttctctgaagaagatacatgaatggccaataagcacatgaaaagatactcatcataactaatcattagggaaacgcaaatcaaaactataatgagataccactcacagctattaggagggttactattaaaaaaaccgaacataacaagtgttgatggaactgctgaatggtacagtcactgtggaaaacagtatggtagttctacaaaaagttaaacataggcttaaccacatgatccagcaattccacttctggatatatatctaaaagaattgaaagcagggacacagatattgtcctgttttcaatatctgtgttgatattcgtagcagcattattcacaatcactaaaatatagaagcaatccagcgaccattgagagacaattggataaacaatatgtgatatatgcacaccatggaatattattcagcctttaaaaggaaggaaatttggccaggcacggtggctcacgtctgtaatcccaacactttgggagcccgaggcgggtggatcacctgaggtcaggagttcaagaccagcctggccaacatggtgaaaccccgtctctactaaaaatacaaaaattagccgggcatggtggtgggcacctgtaacgccagctacttgggaggctgaggcaggagaatcacttgtaccagggaggcgaggttgcagtgagccaagatcgtgccactgcactccagcctgggcaacgagaatgaaactgcatctcaaaagaaaaaaaacagaaaacaaaacgaaggaaatttggacacatgctacaacatgaatgaaacttgaggacattatgcaaagtgaaataagccaattacaagaagacatatactgtgtgattccacttatatgaggtacttagaattgacaaagtcatagagacagaaagtggaatggtggttgccagaggctggggaaaggggagaagtgggggagttattgttaatgggtacagaatttctgtttcacaagatgaaaagagctatgggaatggatggtgatgattacacagaattatgaatgtatttaatcccactgaacacacttaaagatggttaacatagtaaatcttatgtgcattttgccacagaaatttaaaaaggactttagacaatgctttgacacttctagactgtgggaagtcagggctgttgtcttggtaatggtattctgtgtctaaaaaatttgataccagacaaagttaattaccatgtgatatgacaggttcaatcggttttcctgagcccctcaaaagaaaaggagaagcagaagttggaagtgcgtctatcgctttagggacactccagtgctctgaatgagtgagtcttggaatgtgaggcagttcgtctctatgcctctgctcctagaacacacccttcaaaggaaaactttgactttgatccaactttaatcaggggaaggtcattttggtcctaatttcagggttttcagtttctcctggtgtgttgtatgttctcaaactaaacgaggtctccctttgtagtgactgtgatttcaaccacagccactgaatgcaggcctcctgtgcctgctggagtgccaagctgataatatttgtcagtactggtcctgttgagtgatgtgagggttccatagcccctgttaggacaagtaacgggtcactattaagctaggaacttgtctctcattcttttcactgtcgttttgtgtaaccaaagggagtcgttgggggcagagacttctaaaagacctcgcaaaaatcatgaccatccccttccaacgtggagtgaataatattgctaataacattctagaccacccaggttgtttttggagaaagttcagtggaatactaggtacctttgctaggttatcagaagagcaatatgctctgtaatggcggctactgtaggaaaaccttcccaagggggagtcactctggcagatgacaggcgtgtgtgccacagtatgctccggccagggcaagaactgcgcacaaaatcattacagtcctgtggctgctgacacccaggtccacccctccactcttcaaagagggttttggatccttcttgaagcgtgtgttttcttgaccctttaatgatttgtaaaggggtcagggccaacaatttgcctaagaaaagttccaatagcccagtaacaaaacctacagggtgttggtgtgtggagagcaaatgggaagggcaacacaataagaggccagtagattcaaagaaacggactcacgctgattttgcgagcaaagtcttggcactcagtcaaagcagacaggtagagtttcagaaaataccaaggctcgacctctagtgagtacgtagatgccttgttccccctagagcatacttgattttgtttctaatttctatgaagtgttttaattactggaaaaaatctgcagttgcgatatggtttttctcagaatatgggtggtgggctgcactttttttaagctcttttgatttcagctgattagaaaaacctcatttttctagcataccttagccagtgtttttcaaactgtgagttgcaaatcatgaataggttgccaaatccatctcatagatctagaccatcattttaaaaatgaaatagaatgtagaacatgtccgtgtttgtctcacctaggaaacaatcatttattaggattaatttttattatttcaaatttatacctaaaggccagaactgatggcacctgaggcaaggtcagaatagggatggaagatgtagcgagacggggcacttggctcagaaggaggggagaaggcactttcttatacgaagagccaacctcatatagacctgggttgccagtctcctgggtgtcctgcctcatcaagtatttgtgcagcctactccagcaagggtctgtagagcattgctgttcaaggtgtgtaagcttagagtctggcttttcatcctgtgtacctttcatagctgtgtggtgttgtgaaagttacttaacccccctgagcctcagtttcctctcttttaaaataaagagaatagctgctatgtcttgtggctgtgaggaggaaatgttgttgatgtaactgtttagtcccgagcctgccacatggtaagccttttaaatgtcattgctattactgttatatgaaagatggactgtacaaggtaaaattgaatataaagagagatttattgatttccaatttatatcattcaagcttgcatgacacgcacccatcctattcatccatctaataaactcttaccgcagggaaatccagagggatcccttctgagcttgattcatcatctaaggtagtagttgtcaatcctatcggagccacactccttcactggcctgaaattaaattcctaggttatataatttacttataagtataatttcaaaaaacaacataattccacaactgtttttaaaattctgataaaatatgcatttcatgtgtgaaatgtgtgcataactgtgctagaaaatgtcatgaagttggccagtgctgtgcttgcatgtagagccaccaagaatggaggctacaagtgcagactgatacagctgtattaaactggtaactcaaatgtcatcagtagcattgctgtcagtgacatggtttcctggaattatgagtttccaaacgaagaaaagtacatatttccctcggtatccatgggggattggttccaggactacccacacataccaaaatctgaggatgctcaagtgcctcatataaaattggccgagtgtggtggcttacacctgtaatcccagcactttgggaggccagggtgggtggatcacttgaggtcaggagttcaagaccagcctggccaacatagtgaaaccccatctctactaaaaatataaacattagccaggcacagtggtggccgcctgtaatcccagctactcagggggctgaggcaggagaatcacttgaaccttggaggcagaggttgcagggagccaagattgcaccattgcactccagcctgggcaacaagaacaaaactccgtctcaaaataaataaataatttttaaaaataaataaataaataaaatggtgttgcatttgcatgtaacctacacactgcctcctatatactttaaattatctctagattacttacaatacctaataccatgtagatgctgtgtaaatagttgttgtactacattttttagggaatgacaagaatctataaatgtccagtactgatacaaccattctttttttttcctgaatatttttgacaaatgtggaacccacagatatggagggcaaactgtatagtcttactttgacttatatacgcagttgcaatcctggaaaattcagaatatattaaaaccatgcaaaaaattattgtgcttgaatgcacaaaggagtcagattctaggcttggatagttacagacagggttttcacctatgtgcatgcctgacgggacatgtgaatgtcagcacattgcaggactgccagcatccctagcctttgctccctaaacatcagtagtattctctaacctttgtgactgccaagatgctataaagttccaacaggccctatacagttgggatctcttgttaaaggcaaacagctggagggtgtgtggttgggagcagatggggtggcgccctcaaggactggtttctttcttagctaacacagctctttaagtcttgcagagatgggtgggtagatgctggtatgcctttctggagagaaattaggttctttgttctgatttgagtttcccctctgatatggtttggctgtgtccccacccaaaactcatcttgaattgtaactcccacaattcccatgtatcatgggagggacccagtgggaggtaattgaatcatgggagtgggtctttcccgtgctgttctcgcaatagtgaataagtctcacaagatctgatggtgtcaaaaagaggagttcccctgcacaagctctctctctctctttgcccgctgccatccatgtaagatgtgacttgctcctccttgctttctgccatgattgtgaggcctcccagccagtgtggaactgtaagttcattaaacctttttttcttcccagtctcgggtatgtctttatcagcagcgtggaaagagattaatatacccttgttctctacagaaatcttttgagaaaggaagaggcactgactatgcaagcatcaaccaagcatggccctttcctgaaaggcttcatctgtaggagggagtgcttttgatcctggctcccagcatatcagagaaagcttgcctttctctgatgcatcttaactgaggagatgccaagtttattcctcagtgtttacaaggaggcttgttcattttgacaccctttctgtggtgttgtggaaaagcaccgaacatacagagatgagccccatgaagttgaatttctgtgattcagctagcataatgtgggcactttggtttttcaaaagccatgttcagattacacacagaggtatttggttacatatatgctgagactcttgggaggtggccagttttagtctgcaggtcacaaaagggaaaaaagaagttgtacagttatggatgtcatcttgaaaaatgatgtgagaagaaacagtcttcatcttccatatctttttttcttttctaagctgggtttaatagagacatttgtgaactggcctagagggtgatcctggggtcatgtctatcactggacatgcacagagcttgagttatcttatttgttttaataattcatatcatcctttatcttccacaatgagggtggatctatagcacctccatctcctttcctcggggcaatgttatttttctagatttctctgcaaaattactttgagacaccatgagagaagaggaggaaacatataactcataatgagtaactgtccttgaaagagttcttgcatgaagaaaatagaaaacattctaattacaagtaataaaaatatcctgacaaccaaaatgcccacatgagtagtactttactttgcaagtgttagtggggaaacccacagtatttgctttttaaaaagaaatccttataagttttatttttaaaattattatcaggaaaatggacatttttctgttgatgtagagttttgtgaattttaacatgtgtgtatatttgtgcagccatccccataatcaggatacacagcatcatttcatcaacccaaataactctttcctgtaacccagttccagcaaccacttacctgttatccatccctatagttttatctttttgagaatgtcatgaaaatgatattcatgtgttgtacaatagatcatattttgaaactaacatttttttactcagcataatgtctttaagattcatcaaacttcttataaatgtcaacagtttgttcctttttattgttaggagcatttcattgtgtgggtgttccaattgttttgcgtccttgtcagtgcttggtattgccagtcattttaacttgtgctattctaatgggtttgtagttgtacatcatcatggtttccatttgcattttcctaatgactaatggtgttgaacatcctttcatatgcttatttgtcatcctgtgtcctctttgataaagtgtctctttgtatgccttttgcccattttttaaattaggggtttttttttgtttttttttttttttaccattgagttttgagagttctttattatgcatacaaattggatatgtgatttgcaaatattatctcccagtttgcagcttatcctttcattctctgaatagtgtctgtcttagggcaaaagtttttaattttgatgaattccagtttgccagttttttctttcatgtttttagtgccgtgtttaagaactcgttgcccagatcaaggtcatgggttttcttctaaaagttttaaagttttatattttacatttagatccattaagctggcttttgtacaatgtatgacattttagtcaaagtttacttatttgcttacagatgtccagttgctctgaccatttgttgaaaagactgttctttctctactgaattgctttgaacctttgtaaaaattcaatcagccatatttgtgtggatctatttctagagcctccattctgttccactgatctgcatgtttattcctttgtgaacaccaccctgtctggattactgtaactttatataagtcttaaaatctggcagtgtgagtcctcccattttattatgtttttcagaattgctttagctattcgagttcctttgcctctccatataaattttagaattacattgtctgcatctacagaaaattctgctgggacattgattagtattgcgtggaatctacaggataatttggggataattaatactttcattatgttcagtcttccaattcatgaacatagtatgtctctccaactatttaggtcttctttgatttctttcaaagaatttcagatttctctctgaattttgtaggttttacatacagatcctatacatggtttgttagatgtatacctaggtatttgatttttgaaactattataaatggcacagatttttaaatttcagtttttaattggccactgctagttgtattaatttctatggtgactgtaacaaatttctacaaatttggtgctcaaaataacagaaatgtattctctcacagttcaagaggtcagaagtccataattagttttgagccaaaatcaaggtgtcagttagcagggtcgtgttcttttcagaagcactagaggagcatctgttctttgctgcttctagcttctggtggctgccagcatttcttggcttgtaactgcatcattccagtctcttctctgtcttcacattgcctctcttctgtgtgttggcccttcctctgcctctgtttttataaggaccacttgtgatgccatagagggcccacttacataatctaggatactattctcatctcaaggatcttaatcacatctgcaaaaactttacacagggtaattctggcctcataaaataaaatgagacctgttccctcctcttctattttctggaagtgattgtggatgttttgtgttatttctcctttgtgtgtttcatagaatttaccagtgtaaacatttggacctagtgctgctgtttttcaggtttttgattacaaattaaatgtccttcatagttatatgactatccagattacctgtttcggctggggcaagttttagtagtttgtagtttttgagaaattggtccattttatctaagttgtcaaatgtatatgcatagagttgttcatagcattctgttgttattcttatattgtctgcagtatctatagtcatgtcttctttttctttactgttaatttgtgctttccctcttttttctttatcagtcttgctagtgagttattagatcttttcaaagaattggcttttgggtttattggttttccttattgttttttctgttttcagtttcattaattgttttgtcctaattatttccttccttttgcttgccttgggtttatttggctcttctttttttctagattcttaaagttgaagctgaaattgtttgaaactttttttcttattgaatataaacatgtaaagctatgtatttccttttaagcatattttagctgcattgaacaaattttgatatgttgcattttcattttcatttagtttaaaatattttctaatattctttgaatcttaccctttgacccagcgattgtttagaaggatcttatttactttctaagtgttttgaaatttccctatttttgatattggtttctagcttaattccattatggtctagaaatatgcttcgtgtaatgtcaattatttaggtttgttaaggttggctttatgatccatgatatagtcaatcttggtgaatgtttagttatttggatattgggttttccttaaagggagccatacttgaaactggctgttggcagatttactcaagactcttcctggaagattgtcactcacagccaattctttcctttgtctagagcatccaggatgtgaggagtgatgacgaggattatgaagaggaagaggaagaggaagaagaagaggctaccaaaggcaaagagatggattgtttaaagaacggcctcagggctgagaggcacctcattcccaatggccagcatggccattagctggaagcctacaggactcccatggcacagcatgctgcaagtactgttggcagcctggcttccaggccccacaccgaccccacattctgcccttccctctttctcaccaccgccttccctcccacctaagatgtgtttaccaaaatgttgttaacttgtgttaaaatgttaaatataagcatgcccatggatttttactgcagttaggactcagactggtcaaagatttcaaagatttctccacagaaccgtctcagttctaattgcactccctcatgcatgtcactttctcaggggctcgctttgttatagaccctttcgcctcgccaccttgcctgtcctcaggacgctttcacaggtgctaagtgatctcatttttcccaggtgtgtttggccacaaagagcagcttctttctcaaaatgagttagaagtggcagtgggacaggagcggaaggaccacaccaggagacacttccatcctgaagcttaggtgcctcatctccacagggcggtggcagtccctgcctgccaccccacagggttacagcaaggattaagtgagatcacagaagtttaagtacacactgtcaaccgtggggtcatcgtgaaccaacccactttgcactgtttgggagacagaaacctggctaaacatggcactgcaatgggcctgaacaaaaggcagaatctttaaaaattcctcttaaatgactctggagatacctggaaatgaaagtgccaagaaaggtgttccattttatttgctaactatttatgcattagctccccaagggtcattctcagattctcctggaattcttctccctcaggacccatggttcaaggaaggaagcttaggccctgttccttcctgtcctttgctggtctttcccttttttcctttctaggagggaagcttctgtgctgctgccctgagcccttccttcaggccagcacagtacctggggacctccacgggggaatgggatccaggccaggttgcttgctgagcctcatcacccaggaggcctgagcctctggggagggcacgcatgtacactgccagacccaggggagatcttgggaacagaggatgctacgtgatttcctctggcttccaacccaatcagcctgcatcacagtgaaacacaacacaaaaggccataaaaggcatacccctgagaaatgtttaagggcaggtgctagagtcagtgccagctccctgggaggagggatagggacgggcagatcagtagccagcttgtcctcaccctccggaagggagcaccggagaagacttgcacacgtccctgcctcccttgcggccttgtcaccagagggacacatctcctgggcacaatgtgcagggctgacctgggagacttctcaggtggctgctggctgaggagaggccaggccttcccaaggaagaccctgagtaaaatctgcatctgtcctcaccacctggcacagtctctcataacggtcagattttgtatgttcatcctatttattcaggggctcgtactagaaagccacaggagaggtcggcttgtagggactggaaaatcagccccaagcagagcagctgcagggcccctggagccggaaggacactgcacagaacagactgcgttattgttatttttaaataaaaatatacatttgaaaccttaaggctaaacaaaaataaacaaaaaatcctttagaattctttccacaacaatatctctttctgagaaattgttacaaacaaggtcagattttctctgtataacatttgcttttatgaggacaatatcatatgcattatatgcataatatgatattataaatcaaaatgcctgcacccactttagggtatagctattgacttattattaatattatattattattattttgctggaagaaggtcacactaagatataattttttatgttttcagttaacggtatgctttcttctttgcttatttggtttttgtctctgtaccaaatatcttcttgcttaaggtagaaaagtatttgtttacctctatctccagttttttttcttatttgaatgttgaaggtaaaattgatataccaattttaactatttctgatacagctgaaagcactaaactacttcataagaagtagatactcatttttgtaacactatttagggcttttgtggttaattttaaaggaaaccactctttctacaggaaacaagggctcaggattcttcagatgaccttataaaaatgcagtccacagtgctatcaatattgtaacagtaatgactacaataaagccaaaagtccagtgtacctggtgattgagtagattcagcacacacattgcttggcttcttagggataataacaggtctccctgtgtagtggaaataaagatttgccattcctccggaagggccatgccaggaatcagggaagcagtgaggagaaggaagccaggttgggatattcgggctgctgcgtttgcggtgtcagacaccagataagaggagcctggctgacatggggagccccttgcctgattggggtgagcctctgggctatgtacggtggaaccagccagccagcctgggggctggagcctaaggagagctcggcatctgcaccctgtgcaggaaccactgaagtgctaagaaaggggactgattctaaaggtgttttctcagcctcattttctgtatttacctttcaaaggtgtaggaggaaacagagtctagactgtccatcagaatgacctatggagctttaaaaacaaacgcaccttgcctgtctcctgctccacgttttgattcaatatttctggagtgagcagcaaaaatcttcattttaacggagtgccatgtatttctgaagagcagtcaagattctgtgtgccttcctctggttttagtcctagctgcagtttcatatgctaagagctgggaaaatgcaatggtacagaatatttaatccaaaataaaagaagaaaaggaaacacagaacaagcaagatgaatcgcaaactcatgttaagatggtgagtaggtagatttcagttcacatttaccagtaattataccaagtgtaaaaataaagagagtgccaggctcgatttttaaaaatctcaattatacggtgcttacaagagatacactataaaaaagtgttgaaagtaaaaacatggacaaatatataccatgcaaactccactcctcccccaaaaaacgctggcatagttatatcaatatcagataaaggaaaggagaactagtggatagtaagaggaatgtttaatgctaatgaaaggggctaggtgcggtggctcacgcctgcaatcccagcactttgtgaggccgaggtgggcggatcacgaggtcaggagatggagaccatcctggctaacacggtgaaaccccgtctctactaaaaatataaaacattagccgggcgtggtgggaggcgcctgtagtcccagctactcgggaggctgaggcgggagaatggcgtgaacctgggaggcagagcttgcagtgagccgagattgcgccactgcactccagcctgggcgacagaaccagactccatctcaaaaaaaaaaaaaaaaaaaaaaatttaaatctgtatacacctaataatatagcttcaaaatatatgaagaaaaatttcacagacttaaagggagtaacaaattcataatcctgtttgggcggtttttaatacatctctcagtatctgatagaacaagaagacaaaaaaaaaaacaaaaaaaccaataggaatatagaagatttgaacaatgccattaacaaaatccacctagttgatgtatatatagaacactgcccccaacaactgcagaatttacatttgtttcaagtgcatatagaacatttacccaaataggccatatactggcctttaaggcaatttccaaaacatttcaaaggtttaaaatcacatggaatatgattacagataacagtgaaattaaactagaaatctataacaaaaagataaatggaaaaatctccacatatttttaaattaagcaatgcacttctaaataacctgtagatcaaagaagaaatggaaataaaacattttaaactgaattatagtaaaaaatgtgtgggatgcaactaataagaaatttagagaaaaaattatattaaaagcttttataagtaaagatagaggctgacaaaatcagttgtctaaatatatcaaaatataaagaggaaaattagtaacatggaaaacataatagctcagagtatcaaataaaaaaagctggtttcttaaagtaaaaaattt

SEQ ID NO: 40 - DNA, 792 bp, Homo sapiens
aagcagcccggcccggcattttacgacgttcgcagcgctacccttttccgctccacggtgacctccgtgcggccgggtgcgggcggagtcttcctcgatcccgtggtgctccgcggcgcggccttgctctcttccggtcgcgggacaccgggtgtagagggcggtcgcggcgggcagtggcggcagaatgttggctaccagggtatttagcctagttggcaagcgagcaatttccacctctgtgtgtgtacgagctcatgaaagtgttgtgaagagcgaagacttttcgctcccagcttatatggatcggcgtgaccaccccttgccggaggtggcccatgtcaagcacctgtctgccagccagaaggcattgaaggagaaggagaaggcctcctggagcagcctctccatggatgagaaagtcgagtgtgggtattgaagggacccacaggcgcgcccagcagctctcggaagcgttgtatcgcattaagttcaaggagagctttgctgagatgaacaggggctcgaacgagtggaagacggttgtgggcggtgccatgttcttcatcggtttcaccgcgctcgttatcatgtggcagaagcactatgggcttagcctccaagtgggactacgaaaagaacgagtggaagaagtgagagatgctggcctgcgcctgcacctgcgcctggctctgtcaccgccatgcaactccatgcctatttactggaaacctgttatgccaaacagttgtaccactgctaataaatgaccagtttacctgaaacaaaaaa

SEQ ID NO: 41 - DNA, 523 bp, Homo sapiens
cggaagttttgctgctagtcgcggacgcaatggcttcaaggttacttcgcggagctggaacgctggccgcgcaggccctgagggctcgcggccccagtggcgcggccgcgatgcgctccatggcatctggaggtggtgttcccactgatgaagagcaggcgactgggttggagagggagatcatgctggctgcaaagaagggactggacccatacaatgtactggccccaaagggagcttcaggcaccagggaagaccctaatttagtcccctccatctccaacaagagaatagtaggctgcatctgtgaagaggacaataccagcgtcgtctggttttggctgcacaaaggcgaggcccagcgatgcccccgctgtggagcccattacaagctggtgccccagcagctggcacactgagcacctgcactaaattactcaaaatgtgctgtaaagtttcttctttccagtaaagactagccattgcattggctccttctcccataaaaaaaaaaaaaaaaaaa

SEQ ID NO: 42 - DNA, 921 bp, Homo sapiens
tgtgagctcctagaagtcagctttttcacttttacccaagccaaacggttattcgcgtaaggttggttataattaaaatgtcggtttgtgcacatggtttgggactctgtgtatgagtacgactaatatcttcaatttactaagaagataaagaggtcgataaataaggaggtcaagcccgttttgcaaggtcacacaggaaagaagcagaccacgaaatgaacttcggctgtcacctgcggtgggcgcactagaggtcttttgaactccttcggctaccgtcgccgcgttctcgctgtgcactcttattctgcgcctgcgcgcggctacagcacggttcgtttttcctttagtcaggaaggacgttggtgttgaggttagcatacgtatcaaggacagtaactaccatggctcccgaagttttgccaaaacctcggatgcgtggccttctggccaggcgtctgcgaaatcatatggctgtagcattcgtgctatccctgggggttgcagctttgtataagtttcgtgtggctgatcaaagaaagaaggcatacgcagatttctacagaaactacgatgtcatgaaagattttgaggagatgaggaaggctggtatctttcagagtgtaaagtaatcttggaatataaagaatttcttcaggttgaattacctagaagtttgtcactgacttgtgttcctgaactatgacacatgaatatgtgggctaagaaatagttcctcttgataaataaacaattaacaaatactttggacagtaagtctttctcagttcttaatgataatgcagggcacttactagcataagaattggtttgggatttaactgtttatgaagctaacttgatttccgtgttttgttaaaatttcattgttctagcacatctttaactgtgatagtt

SEQ ID NO: 43 - DNA, 910 bp, Homo sapiens
gaggtcagagacttaagtctaaggcactgagcgtatcatgttaaagatgagcgggtggcagcgacagagccaaaatcagagctggaacctgaggagagagtgttcaagaaggaagtgtatcttcatacatcaccacacctgaaagcagactgatccaactgcagagatggcagctgagtcattgcctttctccttcgggacactgtccagctgggagctggaagcctggtatgaggacctgcaagaggtcctgtcttcagatgaaaatgggggtacctatgtttcacctcctggaaatgaagaggaagaatcaaaaatcttcaccactcttgaccctgcttctctggcttggctgactgaggaggagccagaaccagcagaggtcacaagcacctcccagagccctcactctccagattccagtcagagctccctggctcaggaggaagaggaggaagaccaagggagaaccaggaaacggaaacagagtggtcattccccagcccgggctggaaagcagcgcatgaaggagaaagaacaggagaatgaaaggaaagtggcacagctagctgaagagaatgaacggctcaagcaggaaatcgagcgcctgaccagggaagtagaggcgactcgccgagctctgattgaccgaatggtgaatctgcaccaagcatgaacaattgggagcatcagtcccccacttgggccacactacccacctttcccagaagtggctactgactaccctctcactagtgccaatgatgtgaccctcaatcccacatacgcagggggaaggcttggagtagacaaaaggaaaggtctcagcttgtatatagagattgtacatttatttattactgtccctatctattaaagtgactttctatgagccaaaaaaaaaaaaaaa

SEQ ID NO: 44 - DNA, 5598 bp, Homo sapiens
agagccactgaggcctgagcgagagccgacggcgggcgggcgcagctgctgccggagcgccggcgcgtgctggtgggccacacacctttcctcctcttcactcgcgagccctcggacatggtggcccccggctccgtgaccagccggctgggctcggtattccccttcctgctagtcctggtggatctgcagtacgaaggtgctgaatgtggagtaaatgcagatgttgagaaacatcttgaattgggcaagaaattacttgcagctggacagctagctgatgctttatctcagtttcatgctgccgtagatggtgaccctgataactatattgcttattatcggagggctactgtctttttagctatgggcaaatcaaaagctgcacttcctgatttaactaaagtgattcaattgaagatggacttcactgcagcaagattacagagaggtcacttattactcaaacaaggaaaacttgatgaagcagaagatgattttaaaaaagtgctcaaatctaatccaagtgaaaatgaagaaaaggaagcacagtctcaacttataaaatctgatgaaatgcagcgtttgcgttcacaagcacttaacgcttttggaagtggagattatactgctgctatagccttccttgataagattttagaggtttgtgtttgggatgcagaactacgggaacttcgagctgaatgttttataaaagaaggagaacctaggaaagctataagtgacttaaaagctgcgtcaaagttgaagaatgataatactgaagcgttttataaaataagcacactgtactaccaactaggagaccacgaactgtccctcagtgaagttcgggaatgtcttaaacttgaccaggatcataaaaggtgttttgcacactataaacaagtaaagaaacttaataagctgattgagtcagctgaagagctcatcagagatggcagatacacagatgctaccagcaaatatgaatctgtcatgaaaacagagccaagcattgctgaatatacagttcgttcaaaggagaggatttgccactgcttttctaaggacgagaagcctgttgaagctattagggtttgttctgaagttttacagatggaacctgacaatgtgaatgccctgaaagatcgagcagaggcctatttgatagaggaaatgtatgatgaagctattcaggattatgaaactgctcaggaacacaatgaaaatgatcagcagattcgagaaggtctagagaaagcacaaagattattgaaacagtcgcagaaacgagattattataaaatcttgggagtaaaaagaaatgccaaaaagcaagaaattattaaagcataccgaaaattagcactgcagtggcacccagataacttccagaatgaagaagaaaagaaaaaagctgagaaaaagttcattgatatagcagctgctaaagaagtcctctctgatccagaaatgagaaagaagtttgacgacggagaagatcctttggatgcagagagccagcaaggaggcggcggcaaccctttccacagaagctggaactcatggcaagggttcaatcccttcagctcaggcggaccatttagatttaaattccacttcaattaaaccaactgtttttctgctcttcttaatttttttaaagattaaaaacaaagaaatcttgttccgggaccctaatgaaaaaaaatttcaaatcttttcagtttgtccatgaccaaagagttgctttaataggaaaaaatctgttcttatccctgtcagatttatggttaatgggtttgcaacggcaaggaggcaaggaatggttctatttctgacagagcagcctgcatctgctttatgctgtctggagggaagtggtctgaggcaggctcacccgtggaagtgctcacgtattctgtattatttttctacactggagctgagattcttctcttcacagccttgcagagtaagtcagtgcctacaagtgtaagaaggagctgtaatcttcatgaggatggttatacttcagtattcttaaagagaacatgaacatttttgagctgtatgttcttagggacaactgtgcttcgatgtggtcagtctcgtcacttgtgagtagctgtgaaatctttagtgtgcatgtgtttgcacctctgtggtctgtcaacgtggctgtcactgaaggagcaagagaccatcttttaggaaccctgccaccaaataataatatatccaggcttagactttggattaatgttaaatgtacatttttttggttcagtacctgaagaagaatactgaaacttgaatctataaattcctatggacccttttaatattaaacacaacaaattaaaagttgttataggtaaaataagttcagataaaatagtggtggtatttaaaataatattgctgaagtgcagattgaaatactttttaaacaactgaagttctgagtttttatagggaatttcatgtaacaagactggtttagaaacgtaaagttgcgcagtcaacataaataaatacagaatgccatgttctccacttctaagtaaagacagtgggcagcttctgtttctccttctatcaaggcttcaccctatcttaaaggtctgtggtgcctcccacgtgggacctgtctgctggtatgtgttaaacagcagaccggcccttctaccagatcttgatgcctctgattttctcctgcctacaagaaaatacaggcaaggttagtcaggtctggctatatttccactgttgtttcatttaataagatggcatctcctcttgagatatgttcttcttaccttttaagaagatactatttaagaagtgaactattcagtctttgtatactgaatgctttttccctaaaaaatgttaatcaagaatattgaatatttatggcactcttgatgctgcatttgaaagctgaaggaattactttagatagataggaattgctacctttattctggaaaggttttgtttctgcctcaaagcattttgaagtgttttaaccattaaagggtctaatttttttttcttaatgaaatcaagcattttaattcactgtgggaggcatcctgaccacggacatccataacagcaaagcacaaatcgttttcgtctgtagtcatatcctgaaacataggtggacaaatttttaactgagagacaaaaatcacatagttgaattgagcagaacacttaagtgctttctgcatctatttaggagtctatttcttaccaataaacttgacaacgcatttggaaaactagtgaacaccttacagctttcattttgctttaatgtttcaattcaagccggtgtaaaaataatttccaaggcatttctgtttattctttagtaatctcactactggctatgtcagcaatatctttttcaatctggttccttttgtatatgatgtcactgtgacctctttgaaatatagtgatggcttttacctactttgaaaagaattttcacatagagtcagaaaaaaaaggaaatatcaaatcacttgcctttccacttggagagcacgacagttgccaacaacaaggggtcaagggccgcacaggagatgtgtgggggcctggccacctcccacctgctgcccagaggcttgtttgcattttcattttttctccacttgtaacaaccatagtttcagctcctaaattcttatcatggatttacttagtcatcttaactgacctgcagttacttgcctgttttcagtgaagagagagaagcagctctggtgccacatgccagtgccatggagggaaatgaattctctgcaatctgttgtttcgctgattcatgaagaaagtaacaactgttgagtttcagccttgatggctgtcggcagttttctggtgtccacccaaacggagagacagtcactcctgcttaccctaatgtgtgactgagaagcagcctgggtgtgtaaagagatagtcattccccctgcctgtctcactgtagggtagcattatccactgtaaaaccatactactttcattttcccttggggactacaggtgccaggtaacctttttttttttttttttttttttttgagacagaatcttgctctgttgcccaggctggagtgcagggacacctcccgggttcaagcagttctcctgcctcagcctccaagtagctgggactataggcacgcaccaccatgcctggctaatttttgtatttttagtagaaatggggtttcactgtgttagccaggatggtcttgatctcctgaccttgtgatctgcccgccttggccttccaaagtgttgggattacaggcgtgagccactgcgcctggccatcaggtaacctttatggctctttcaggaaaagtgaaatcagagaggcgtaccctagccacagctgttgtattctgctcttctttcctttttggtgagcttcatgggtggagttatcagtggtctgtactttgtggatattttgcccagcaggaagtattagacacatcagtctagaagcattgtgaaaaggttccaaaacgggagacaaaatttaattcattcctcagttctgaaagtttgtgctttcttaccatgaatagatgaaaacttgaaaaaaatcttgacagtttactaatgtgaatcagatgtaacgtactactaattctacaatgcctttctctttagtcagtattaaaaatcttttttaaagtattggtatgaaaacaaatttttgttgccctgataatggaattttaaaactacccacagtttaagagaaaacataacttggtaaaaaaggtagccaataaaaccacaatttgaaattgataccattttctactcacaatggatgatgaaaaatttcacctttaaatgggtcagaagttgtctttgacatttaccatgaaaaaactacataaaatggctccctggtgaggttacagacacggccctggtgatgggcgttgcaaagttttcactgagcacacagcaatggtatcacctagagaagttcacgcaactttgttgaatgtagttgacttttccaaatttataaaggaaggaagaaggcaaatgttaatttgccaacaacgaatatcctttttctaaatcagatcattccttttttgttagtggcagtttatcctgtaatttcaaatgacgttaagaggtgggattatttgggggttttttttgtttgtttacagatgatctcatttgctgaatgattgatttaagagtaaaattagccactgcgtggctttgtgtatagtaaccggttttgttgcacttgtctgtggctgaaacacttacctgcagtggaaagccgagcaaggaggaggtaaacattggagatgtttgtgaaaatattactcttgctgtgaggttttagtttgttttgaatgagaaaagactaagtaacttaatccatctcaatgtagtgttttaataaaaaaggaacctaatatttgaaatgggtctcagacatgtctacaaatatgggtactatttttatgcccgtgtattttcacatttaataaaaatatttatggtcatatcagtataaaaaaa

SEQ ID NO: 45 - DNA, 23182 bp, Homo sapiens
tgccctgtcccaggatggacagcacttcatgagtgctcagtgcagggacacagaggcctggacatgttggtccaacctggaaggttcattccagctccagagctccctgtaagatccagcaaggctgtcctggagcctacccggcagcgtgcttctccctctgccctccctggcttcttcccctgtccctcctttcccttcccagtactggtcctgagagcatgctaaacttcctccccgctaatctgcatctcagagtctacttcctgaaaccaagagggagggcagcacatccccaccccaggcccaggaaacgcagaggtgcaggtggggagaagacgccttcccctcagcagggctggatcccctgactctttcctcacctcggagctcttgattctcctccaggcagcgctggagggtctcaggagcgccctgttctgaaggcaggtgcagcatggctggcttccccagaggagactcttcgcccagtacgtcctgatctgctgccgggccaccactgggctgcaccatctcacacagttggctcttccagaggtgcctattcatccaacagggcaagggctgaaagagaaaggcagcaggggagtcacaggagacccacatccttacccagcagaaaaagcctatgagttctggggctacattttaaacagaatgctgataattcacctagtgtatcaggatgctaaagtgggttttcagtctaaggggtagcagatactcccattccaaagggaggtgctggaccacccatgtgggacttgaaaaggcctagctccaggctggaaatagaagaatttcaccagagatgggagagtcgggacaagactgtttgtggagggagatgtcagtatgctgggaatcctgatcccctacacacctccaagcaggagaagtggagggtaccggcccctcatccagtgtagtgggctgaatggtagccccccgaaaagatatgcccatgttctaacccctgaaacatatgtgattcgggaaaagggtctttgcagatgtaggatctcaagatgagatcattctgggtgacgtgggtgggccctaaatccaacaacgtgtctttatgagagacagaagagagaagccagagggagacgcaaggggaggaggccatgtcgggactgcctcggagactggagtgaggcagccacaagcccaggaataaatggggcagaagcttgggagaggcaagggaggattgccctcttagagcctttgagggtgtgtgcttgctaaccctttggttttggacttctagtctccagaactgtgagattaaaatgtctggccgggcgcagtggctcacacctgtaatcccagcactttgggaggccgaggcgggccaatcatgaggtcaggagatcgagaccagcctggctaacacggtgaaaccctgcctctactaaaaaaaaaaaaaaaaattgccggtcacggtggctcacgcctgtaatcccagcactttgggaggccgacacgggtggatcatgaggtcaggagattgagaccatcctggctaacacagtgaaaccctgtctctactaaaaatacaaaaaattagccaggcatggtagcgggcgcctgtagccccagctacccaggaggctgaggcaggagaatggcgtgaacccgggaggcaggagaatggcgtgaacccgggatcgcgccactgcactccagcctgggcaacagagcgagactccatctcaaaaaaaaaaaatacaaaaaattagcagagtgtggtgacacgcgcctgtagtcccagctactcgggaggccgaagcaagagaatcgcttgaacccaggaggcggacgttgcagtgagctgagattgtgccactgcactccacccttggctttcagaacagccccttctcctggtttcctccctatcttgctggctactcctgcccaggcactctcactgggttcccatccttcatgttgggctgccccagggctctgtcctaggacatcttcttctctgtaacttcattcactcccacaggaattctgtccagtctcatgccttgaactccaatcttgatgcttaattagacctcttttctaaactccacattcatttatcaaactcgacatttctacttggttatctagtagccttctcaaaacgaacctctctaagacctccgacagtccccaaaacccagatctacccaaggccttctttgttatcagctgatggcgaatccatcctccagctgtcaaaagtcttttttgattctctctctctctctcacacacacacacacacatacacacacacacacacacacacacaagagcacatctaatccatcaagaaatcctgttaaaatgtatcccccaaccgatctgatcacactgagcaattaacattaactattttaggtgtcataatgatattgtggttgtttttcagagtcctgtcttagagagaggcacacttaaatgtttaaagatgatgtctgaattcacctccaaataatgggaaaactcctaggtatataccggagagaaatgaaaacacatgtgtccacatgaatgcttgtagcagcattactcatagcagccagagagtggaaacaacccaaatgtccatcaactatgaataaacaaaatctagtacatccacatgctataacatgaacaaatcttgaaaatatgctgagaaataaacaagtcacaaaagattaaacattgtatgagtctatttatataagatgtctacaacaggcaaatccacagagacataaagtggattaaagattgctggggagtgccacttagggctgaggggaagataagctgagctaaagggtatggggtttctttgaggggtgacgaaaatgtcctgtgaatatacatacaacaaaccattgaattgtacactttaaatggatgaactgtgtgacatgctaatgatatctcaagctgttattgaaaataatagtggtggccaggcatggtggttcacacctgtaatcccagcactttgggaggtcatggcaagtggatcacttgaggtcaggaattcaagaccagcctggccaacatgacaaaaccctgtatttaccaaaaatacaaaaaaaaaaaaaatagctgggagtgatggtgcatgcctgtaatcccagctatttgggaagctgaggcaggagaatcgctcaaacctgggagatggaggttgcggtgagccaagatcgtgccactgcactccattctgggcgacagagtgagactgggtctcaaaaaaagaggccgggcgcggtggctcatgcctgtaatcccagcactttgggaggccgaggcgggcggatgacaaggtcaagagatcaagaccatcctggccaacatgatgaaaccccatctctactaaaaatacaaaaattagctgggcgtggtggtgcacaactgtagtcccagcggctgaggcagaagaatcgcttgaatccaggaggcggaagttgcagtgggtggagatcacaccactgcactccagcctggtgacagagcgagattctgtctcaaaaaaaaaaaaaaaagaaagaaagaaagaaaaagaaataaaataataatgggagaggattgcgagggatataaacaaaattagtcagaagttgataccttcaattgttgaagttggtagctgtgaatgtaagatttactatactggccgagcgcagtggctcacacctgtaatcccagcactttgggagtctgaggcaggcagatcacctgaggtcaggagttcaagaccagactggccaacatatagtgaaaccccgtctctactaaaaatacaaaaattagctgggcgtagtggcgcacgcctgcagtcccagctacctgggaagctgaggcaggagaatcgcttgaacccaggaggaggaggttagagtgagctgagatcatgccactgcactccagcctgggcgacagagcgagactccatctctcaaaaacaaacaaaccaaaaagatttactatactcatttttctactttcgtacatttttgaaatttccaataataaaatgctcaaagcactgtctctgagctggattactgcaattacctcttaccacgccacccttcttttacccttgcccactatggtctgttctccccaccactgctagaacgatcagtgtaagacgtaattccgatcacattcctcctctactgagaaccctaccatggatccccgttgccttctgcgtaaaagccaatctccctacaacggcctacaaggccctgtaccatcgggttccccatcccttcctctccaactgtgctcccctccctcactctgctccagctatagtgacctccgtgctattcctctaatgtgccaggagagcccattcattctcagatcacagaaacagtatgacgataggcagatgttgtcttgcaaaacgagcaaacaggcatatgaaatcagatacctagctgccaaactatatgtgaggcatttccgaagaatttaacgacctcgatagagcgcagtcaagtttggtgaacagaatatgtctctgaactagaggagtcctcacacaaggagtagggtcagaccccgcagtggaggaggagggaggagtagaaacagtccagctcgccgcccaagtaacctgggtcctgaatcggcccgccttggccagtgctccagaagcgcggagcaggaacgggctggggcccaaaaaagaggggggagcctgaacgtccgggggaagtttcggaggcggcggaacgcccacggatggaaccctgtctttggggaaaaggaccacacctgtcagcagagtccgtcagacgtgagaagggtgggagcggcggactgtgaacgctggtagggccccggcgctccgagaaagtcccagtttcgcggtcgcccttccctaccacgcttccggcttccggtgtcatagctgtgggatccggaagtaaaaacacaagccccgcccccgagaactcgggaagccggcgagaagtgtgaggccgcggtagggccgcatcccgctccggagagaagtctgagtccgccaggctctgcaggcccgcggaagctcggtaatgataagcacgccggccactttgcagggcgtcaccgcctacacgccccctcgtctctcggacggcggcgtctagcctcggggcgctcggccgccccgccctctccgggggaggaatcaagaagagactgcccaatagggccggcttgacccgcgaacaggcgagggttcccgggggagtggcgcggcagaaggccccgcccaggagccgagggacagcccagaggaggcgtggccacgctgccggcggaagtggagccctccgcgagcgcgcgaggccgccggggcaggcggggaaaccggacagtaggggcggggccgggccggcgatggggatgcgggagcactacgcggagctgcacccgtgcccgccggaattggggatgcagagcagcggcagcgggtatggcaggcagccggcgggccggcctccagcgcaggtgcccgagaggcaggggctggcctgggatgcgcgcgcacctgccctcgccccgccccgcccgcacgaggggtggtggccgaggccccgccccgcacgcctcgcctgaggcgggtccgctcagcccaggcgcccgcccccgcccccgccgattaaatgggccggcggggctcagcccccggaaacggtcgtacacttcggggctgcgagcgcggagggcgacgacgacgaagcgcaggtaaccggccgggcgggcgccgcgcaggcggaggagcgtactgtcccgcgctgcgccgcgcggcggtaaaatacacgctgtttgttgtgcttgagaaccgagcagaatcgagagggtcttaaccaatccctttataccccgcacctcctctcttgagcccctgagaccccgagagcgaaggggacttgccgaccggggtcacccagcttggcaaggggagggctggagctgaactccagcatctgcaccatctcccatgctccaggtcattgtggagttcccgctacagtcgggaatgagatggtcctgggcacgcagttccatgccccacaaggattttactcggttgtccagaattgatgctgtagtcggaatacaccaatgctttgagtaattttgtaatgtacaccctgaatgaaggctgcctaggagagagtggctggagcccagagccagcagtttctaacccatcaaccactccccaatgcccagccgttcacaaggagtgatttgggcaatcaggtgtcaccctggtgtgagaccccagaggaactctcaagaaaggggctaacttctcaatgctctcctgttcttctgccttgttaacgagcctttcttccaccagacagcgtcatggcagagcaggtggccctgagccggacccaggtgtgcgggatcctgcgggaagagcttttccagggcgatgccttccatcagtcggatacacacatattcatcatcatgggtgcatcggtgagtatctcccaggccccaatcttaaaagccaggaagtgcctgctccatgcctcagcttttccaactaattgttgcagggccccacaggctctgctaagttgagctcctcctcccgctcctgctagtgcgccaggatcatcccggctctacctggtgtgcatatgcacttgcaagacttttttttttttttttttttggagacggagttttgctctggtcgcccaggatggggtgcagtggcgccatcttggctcactgcaacctcggcctcctgggttcaagcgattctcctgcctcagccccccaagtagctgagattacaggcatgcaccaccacacccggctaatttttgtattgttagtagagacggagtttcaccatgttgaccaggctggtctcaaactcctgacctcaagtgatccgcccgcctcggcctcccaaagtgctgggatgacaggcatgagccaccacgcccggctgcaggacgtttctgaaccctgtgcctagccgctgaatgtagcccttaatcctggagttgcaggctctttagggactgtctagatggacttcttggggaaaacagggaatgctattcattctgtagttttttcagacctgttcatgccttaacaaatgagttccaaaggcaggatctgaggcctgatctctgcctcttcactaacacttcaagttccgtcgatacaaacacttagcttttctttgaacactgtctctttgcctcaatttcgaaagcctaccaaggagctctgcctcaccccacctggccccaattgtccagcttgtagaaccgccattctgcactcataggaaagacaaaagaatagtatagcatgaggatttccatgggaggggagggaggggtggtcctaggacagccatcgcccgagactagagcaccctcccctgtgtcccatggggcagtgagactgtgcaggggctggtggaacaagggcttcatctcaaattacacgtggtctcagttttcacttttaaccctggatgcactcaagaatctctctgctcattactgtatgaccatctttgccattaacttaccttgtaaccttgagcaggagctctatcaaaactagttagttcttccacatcgtgcgcccctcagtgctggctgagctcagtggttctttgttcacatagaacaacgcgctgtcacactttgtcaaacctactccttgacacctttgtacttctgatcagaacttagaaaaggagagccaaaagggaatgaggaggcagccgagggagaagggctctgccagtggcagagtaaggaggggccattgtcctctgactccccataagcctgagacccaggagaggtaccaggtggagcccacagtagattgggcttggcctcagccccagccccagcctggtcccctcagaagagccatacctggccgggcacggtggctcacgcctgtattcccagcactttgggaggccgaggcaggtggatcgcctgaggtcaggagtttgacaccagcctggccaacatggcgaaacccagtctctacttaaaatacaaaaattggctgggcgcagtggctcacatctgtaatcccagcactttggggggccaaggtgggcagatcacaaggtcaagagatcgagaccatcctggccaacatggtgaaaccccatctctactaaaaatacaaaaattagctgggcgtggtggtgcgtgcctgtagtcccagctactcagtaggctgaggcagtagaatcgcttgaatcagggagtcagaggttgcagtgagctgagatcgcgccactgcactccagcctggcgacagagcgagactctgtctcaaaacaaaacaaaacaaaaaggccgggcgcagtggctcacgtctgtaatcccagcactttgggaggctgaagcgggtggatcatgaggtcaggagattgagaccatcctggctaacatggtgaaatcccgtctctactaaataaaaaattagccaggcctggtgtgggcacctgtagtccagctactcaggaggctgaggcaggagaaaggcgtgaactcgggaggcggagcttgcagtgagcagaaatcgcaacactgcattccagcctgggtgacagagtgagactccatctcaaaaaaaaaaaaaaaataacaaaaattagttaggtgtagtggcacccatctgtaatcccagctacttgggaggctgaggcaggaaaatcgcttgaacccaggaggtggaggttgcagtgagctgagatggcaccattgcactccatcctgggtgacggagtgagtgagactccatctcaaaaaaataaaaataaaaagagccatacctgcatcagccacaaaccttaacagccaggactctgaccgttaaacccttagtccaagaagcagactggaggagaaggtaactgaggttgctttctccatccccaccccatgctgtcacaaggcactgcaacagagcaacccaggccacaatgatagcttatgactcctggccttcagctcttattagacacctcattgagagcatccaagcttgctgtgtgagttggagcaagtgtcttccttttcctgaacctcagcatttcgtgtagcaaatgacagcttttgaaacgagggcccagggtccttaggcttttccaagctgattttgtcatttcactgcctccgcctgtggccagcttcgggttgggcaactttgttttgttgaaatcagtagggttcccctttgctctcctctgttctgagagtgacaacctgaggctttcaaagcagaaataggaagtgccagctccagcactgtgggtaggggacaaggggtcctctctctgaagagcctcgtggtttgttttttcctcttcctgctgtgggggagatgggaggtggcgtgctcaggcagcacctggaacagctccggctcccaggcttcttccacgcctgatgcctcactcggtgcgggaggtaggcagggtggcacttgagggcacgtgatcctagaatctgctgttccaggaaagcagcccattctccgttcattgagcagacagcgattgggtacttctgggccacagcagccagtccctgccctcctcatgggacctatgtgctattgcggccagggaaccacggcaagtaagcagaccagcaagagttcaggctgacgtgtgtttcagaagatacacatgggccctgtgtccccagtcccccaaagcgcatagatcccacaaagagggccgggagagcacaaacacagaaggaagagcaaatgcccggagccccgagttgggaacaagctcagcatgacctagaaactgaaagcaggcaagtggctggcagacccacagcctgggcaagcaggacaccctggggcaggctggacccacgtggccttcctctgtcccttcctcctccctggccagcttacctcacacttgcccacacacccagcttccttcctgggggccctgatggcacctcagagttaccaagtgggccacttcctgccttctcaggactcccacccctaccagaaagggagccgaggtacttactgcccccttccagaaagctctggccttgtagactagtgtgcgcctggaacagcatctttccccacctgatgggacctcgatgatgctggagagcttcacagggagtgaggggaagagactgggattgatagtctgcggggtcctcacttctctgggccttagtttccccacctggatcacaagggccatgggcttgatgggcgttcaggacgcatcccaatgatgggcctgtgggagggatgacccagcggcccccgcctcccctttcctcagaacatttctgggctgacttccccattggtctgataagattcttgctgtgtcatgatgatgttggcactcccccaaagccccggtgactcatgagcccccgggtatagcagggaggcccttttgttggtttttcagctgaactaactcagcagcccccaggttctctggccccagtggccaggaaccagctgggcccctgccaaggcccagggctccacccagggagtctgggcaggtccttaaccccagtgacccttggggatgggatggcccacccccgctggccctccagcaggcatcgtgctctaccatgaaaccctcatgccaagacaagggctgcagcgatttcggtttataaaacagacaggtcatggcccaggtccctttgccctggcctagccagatgttggtggctagagatcttcatcatgccctgcttctactaagtcaccttgtgtccttgggcagatccctcccctgctgtggtcctcaggaaagaggagggcgtggggaagatgagaagctcccaactgcttttcactaaggaccccttgaattgcccccacccacatggcacgagtagactcttgaccaagctgtcaggtttcccgatgtcttcccatgtttgttcctccagaaagtcccactagagcatcgcagccagctgggagggcagggctacccctgagtcctgaggagagcagctcagtccggctcagctcagcttagctccctgtcaccatgggagagagcggcctgccttaccccacccctactgtccgtcttacctcacctcgcctctcaggtgacttggagcccagcagacggtcggtcggttgcagggcctgagctgaaacaaggtgagccggttcaatctctagttaatcccaaagggagcagcaggaacaaacggcctggagcgtggggttgctgtgactcagcagaccagtcccctgccaccagtacctttctggagtctgtcccgatgcctcccagtcttccggaatttggtcatgagcaaacatgacctgctttgagtgaggcttagaggtatttgcaggctgtggttctttccgtttatttcagggtccagttagttcccagtaagctgaccctttctgtgtggggccagccgtgagttgatgtgacatgggcaacgttcccctccccagccccactgatggcaggtgctgtgaggagctgagtagaggagctcctaccccagggcgaggggttgtctgctggactttgaagggtgcagcagtgagaggtccgtgtcgctgtagtcctggcaccgagctcacctgaggagcatcagaagtggagcagggcccctgaagagcgcaagcacacaaggcacccacaccatagcagttgccctcctggaagccctgtggtggcttcctaactgcctggctctgggtgagggcgtttgacctggtggcatggcccccattctgtaatggtttgtagaaatggacccatccatggttgcagtgcctgattgcttcgaagagcatgtgttttttttttttttttttcgtgacatggagtcttgctgtcacccaggctggagtttggtggcgcaatcttggctcactgcaacctccgtctcctggattcaagtgattctcctgccttagcctcctgagtagctgggattccaggtgcctgccaccacatccagctaatttttgttttttcttttttttgagatggagtcttgctctttcaccaggctggagtacagtggcgcaatcttggctcactgcaatctccacctgcgaggttcaagcaattcccctgcctcagcctcccgagtagctgggactacaggcgcgcaccaccacatccagctaattttttgtattttagtagaaacggggtctcaccatgttggccaggatggtctcaatctcctgacctcgtgatccacccacctcaacctcccaaagtgctaggattacaggcatgagccaccgcgcctggcctgtatttttagtagagacggggtttcaccatgtttgccaggctggtctcgaactcctgacctcaggtgatccaccctcctcagcctcccaaagtgctggggttacaggcatgagccaccacgcccagactattagtttttaccatgttttattgaaatatatgtcatgggccggccacggtggctcacgcctgtaatgccagcactttgggaggccacggcaggtggatcacaaggtcaggagtttgaggccagcctggccaacatggcgaaaccccatctctagtaaaaatacaaaaattagccgggcgtggtggcaggtgcctggagtcccagctactcaggaggctgaggcaggagaatggcttgaacccaggaggtggagatttcagtgagccaagatcacgccactgcactccagcctggccgacagagtgagactccgtctcaaaaaaaaaaagaaatacatgtcatgaagaacacagatggtgcaggtctagcttgttgatgacttttcacaaactcagcacagccacagaaactgctcctagatcaagaaacagaatatgctctgcacccaggaagccccctcacctggggctctcacagtcactggccctcaaagggtcatttctgacccactccccaccctccgctccattgttggttttctcgccgtcttttgttggtgcgcaaatcttaactgtacaattggctgtacaccctcatcacaataaaggccatcgtcatctccccagaaagttcctgggtacccattcccagccaatctgccctgctccaggcaaccgctgatctgatttctgtcacaatgggttgcatctctgatgctgagatttcccagtgttgctgagtagtatccgttgtatgaatgcacagtttgccgggtcacatgttaattcaagtgtttgacttgtttccagtttggggccgctatgaaccaaggctgctgtgaccattcgtgtgcaggtctttgtgtggacttgcactttcatttctcttggggtggaacggccaggtcacaggataggtgtgtgtttcacttgatcagagggagcacccgcaccacctcacagctcaacttcagccattttcattttcttgccttactgcacttttcttgttcctgattgcttaaagggatgattaatatttcagcatttcctataagtgtgatatttgtagtatttgtaaggatgatggtttgggggtttttttgttctttgttttttggtggtggtttttttttttgagacgacgtctagctctgttgctcaggctacagtggtgtgatctcggctcactccagtctctccctcctggttcaagcgattctcctgcctcagtctcctgaatagctgggattacaggcatacaccaccatgttcagctaagttttgtatttttagtagaaatggggtttcaccatgttggtcaggctggtctcaaactcctgacctcaagcgattccccgcctcggcctcccaaagtgctgggattacaggcttgagccaccacgcccagccagaatggtgttttatagatgccctttatcaagttagtgaagttcccttgcattccccctctgctaagagttttagcgtgaataggtgatttctgaaacacttgatctacatctgttgggttgagcaagattgctagatttaaaaaatcaaaacatagcagtaggcagagagttcttagaggttttttttaatctcttaatatggtgaatttcaatgatttttttctgttaatatcaaaccaactttttatttacagatgtatttattctgtaaataaaaaacctaccgtttttaacattgcaggatttggtttgctgatgttttcttctttttttttaaagagacagggtcagtgggtcgtcgtggctcacgcctgtaatcccaacactttgggaggctgaggcgggcagatcacttgagcccaggagttcaagagcagcctggacaacatggggaaaccctgtctctacaaaaaatacaaaaaattagctgggtgtgttggcatgtacctgtagtcccagctactccagaggctgaggtgggaggattgcttgagcccagaggcagaggttgcagtgaactgagatcgtgccactgcactccagcctaggtgacagagtgagaccatgtctttaaaaaaaaaaaaaaaaaaaaacctcctgatttcaagcaatcttcctcccaccttggtctcccaaagtgctggggtgtgtgagttgtgcccggcctgctgatatttcgtgtgggatttctgcatctgcatgtgtgtgtgaatgaggcgtatgggttttcccatgtgcctttctcatcaggtttccgtaccaaggctctgtaggccccataaggtggcttgggaagtgttcccctttcttccttctgcaggaagagtttgcttcaggctggaattctcttgtgcttgcattttggtagaacccactggcaacactctctatgccagggggttgtttctgtaggaagatttgtggccactgtcccctctcaggtccattgctctgttttttgtttgtttgagacggagtttcgcttttgtagcccaggctggagtgcagtggcttgatcttggctcactgcaacctccgcctcccaggttcaagcgattctcctgcctcagcctcctgagtagctgggattacaggcatgggccaccatgcccagccaattttgtatttttagtagaaacggtttctccatgttggtcaggctggtcttgaactcccgaactcaggtaatccatccgcctcggccttccaaagtgctgggattataggcttgagccaccgcgtccagctgtttagttgtttttttgttttttgttttttgagacggagtttcactcttgtcgcccaggctggggtgcaatggtgcaatcttggctcactgcaacctccatctcccgggttcaagtgattctcctacctcagccttccgagtagctgggactacagacacccgccaccacgcctggctaattttttgtatttttggtagaggcggggtttcaccgtgtcagccaggatggtctcgatctcctgacctcttgatccgcctgcctcggcctctcaaagtgctgggattacaggagtaagccactgtgcccggcctatgcccttttaaaaaagcaaccatgccagggggttgtctgtttctattcgtctttttcaaacaccaatttccagctttgttcatcttttctttgggttagcttttaattttattaattttacttgtcattatttcctattttcttcctggtaatttggcttgcagttctatctttttctcactttttttttggagatgaagtctcactcttgtcacccaggctggagtgcagtggcacgatctcggctcactgcaacctctgcctcccggattcaagtgattctcctgcctcagcctcctgagtaactgggattacaggtgcctgccaccacacctggctaatttttgtatttttaatagagatggggttttgccacattggctggtcttgaactcctgacttcaggtgatctgcctgcctcagcctcccaaagtgctgggattacaggtgtgagccaccgcatctggccctttttctcacttcttaagtggaatgcttagctccttatttttgaaccactcttttttgctaatgtaagcacttgaggtcacgtctcacaaatgtggctacatggtacttctgtcgtcccttggttctactgaattgaattttcaggttttctcctggaacgcaggagatgcgtttatgtcttctgggtcagggatggagggctggcacaggcttgaatctcggggctcttctgtctgtatatcaggcaagacagacatgcttgtggcccagtagtgatcctgagtagtgcccagatcaccaagggtggaggatgatgtatgtaggtcgtgtccccagccacttctaaccacacacctgttccctctgccacagggtgacctggccaagaagaagatctaccccaccatctggtaagtgtgtcccaccactgcccctgtgacctcccgccagggacaggcctggtcctgccctgcccgcactggttacagctgtgccctgccctcaggtggctgttccgggatggccttctgcccgaaaacaccttcatcgtgggctatgcccgttcccgcctcacagtggctgacatccgcaaacagagtgagcccttcttcaaggtgggtggtgtcagggcctcccccagcctggttctgccctctctaccagcccccagcatggccagcttcggggacctccccccatcccatcccgggatgctctcctcctctcctgccccgccccgcctgctctcgtacttccttgagacccccattaccagcccccgtgaccaggacccacaggtcccctcctgctgtgctctgctgcgttttctccgccaatcatagttgggtgtcatgattttggagagagagctttctccagtgtatttctcccaggtcaaaatatcctgaaatctggcctctgtcctaaggcacaggggtcccagcctggggcagtgtctgtgctgcctgctttggcctccctccctctggatgtgcagagctgctaagatggggctgaacccagtgtgggacggggacactgacttctgagggcaccctccctggacctccagggaagaccctccactcccctggggcagaacacacacggactcaaagagaggggctgacatctgtctgtgtgtctgtctgtccgtgtctcccaggccaccccagaggagaagctcaagctggaggacttctttgcccgcaactcctatgtggctggccagtacgatgatgcagcctcctaccagcgcctcaacagccacatgaatgccctccacctggggtcacaggccaaccgcctcttctacctggccttgcccccgaccgtctacgaggccgtcaccaagaacattcacgagtcctgcatgagccagatgtaaggcttgccgttgccctcccttcccgcctgccaggctggcccaggcagtgctcccaccactctatgagcgtgtccggggccggggatctgggcagcatccatggtgccggggccatccccagcgggaccacaaggtggcagcgttgctccacgaaacaccgcctttccgctctgcttccccaaaggcccggccaggccgcagggtggcagccttgctctgcgaatgcagcatggcccgcgctgggtggtttcccaacccagccagaggctcttgtcctctggctggttttgaatgcgggggtagtaaagcaaaggtcctcttctcattttcaaaaccaatgaggaagccatggcttggatgcctcctccccctgctcccctacaggccttcaggccactcagacccaccggggacccagcatgaggcaggaggggaacgggcccccggcagcatgccagcaatgccaccctggcacccagggtgggaaggcttcccggaaggtgttgagccagagggtcatctgggaacacaaggcacgggaggtggccacgggggcgaggaggttctggcctctactcccctgggagggcgtctgaatgatgcagctctgatcctcactccccgaagaggggttcaagggggtaacgcagctccgggctcccagcagaggctggaaccgcatcatcgtggagaagcccttcgggagggacctgcagagctctgaccggctgtccaaccacatctcctccctgttccgtgaggaccagatctaccgcatcgaccactacctgggcaaggagatggtgcagaacctcatggtgctgaggtggggccaagcctgggccgggggaccagggtgggggtggtactcaggagcctcacctggcccactgcctccccgaggacgaattcctccagaactcagacaagggtgacccctcacatgtggcccctgcaccacagaggcccaaggtcagttcctccaccttgcccctccctgcagatttgccaacaggatcttcggccccatctggaaccgggacaacatcgcctgcgttatcctcaccttcaaggagccctttggcactgagggtcgcgggggctatttcgatgaatttgggatcatccggtgagagctcttcctctctcctgggaggctggcacagggtggcagagccagtcaccctgcagggctactcttccctatcttgggggagctcctcctcaccctgcagttcaaaacctaagtgtctgagctatcagaccgggctggaaagggctggacccctacacagccaagcaccccacggttttatgattcagtgatagcatcaccatgtccttccttgatttaaggggacctggaagacaagggggatcaggaagtgagtcttgcagcttgtcactaggaagccttgtttggggtccccatgcccttgaaccaggtgaacagggcggggagctaaggcgagctctggcctcttccgtccccagggacgtgatgcagaaccacctactgcagatgctgtgtctggtggccatggagaagcccgcctccaccaactcagatgacgtccgtgatgagaaggtagggggtgcaccccagtccccaggagcatgccctgtcgcaggcccatctgtgacgaggcactgagctggggtgtgcatgcagagcaggtgtcctcaaccccggagaagtcaccacctctgagcacagcgtggcctcccggaggtgacctggactggcagtcatgaagcccaagttgtcatgtcccaggcctgacagtcactatgtgaccagggaaggccattgcctctctgggcctcagcttgttcatcagaatagactcgagatggaccagggtggtcctggagggtcctcagggaggggccctgagctgggcctctggcagggtgagcagagccaagcaggggcctcctcctgccctgagggctgcacatctgtggccacagtcatccctgcaccccaactcaacacccaaggagcccattctctcccttggctttctctcaggtcaaggtgttgaaatgcatctcagaggtgcaggccaacaatgtggtcctgggccagtacgtggggaaccccgatggagagggcgaggccaccaaagggtacctggacgaccccacggtgccccgcgggtccaccaccgccacttttgcagccgtcgtcctctatgtggagaatgagaggtgggatggtaggtgatgccttcgaggcccagcaaggcagaactgggcatgccctgtgtgcgggcactggagctcccactgagacactcacgcactggtccacaccctgagagagctggtgctgaggctgccctttccgccacgtaggggtgcccttcatcctgcgctgcggcaaggccctgaacgagcgcaaggccgaggtgaggctgcagttccatgatgtggccggcgacatcttccaccagcagtgcaagcgcaacgagctggtgatccgcgtgcagcccaacgaggccgtgtacaccaagatgatgaccaagaagccgggcatgttcttcaaccccgaggagtcggagctggacctgacctacggcaacagatacaaggtgccctacagagaaggagcagtgtggagggtgggcggcctgggcccgggggactccacatggtggcaggcagtggcatcagcaagacactctctccctcacagaacgtgaagctccctgacgcctatgagcgcctcatcctggacgtcttctgcgggagccagatgcacttcgtgcgcaggtgaggcccagctgccggcccctgcatacctgtgggctatggggtggcctttgccctccctccctgtgtgccaccggcctcccaagccataccatgtcccctcagcgacgagctccgtgaggcctggcgtattttcaccccactgctgcaccagattgagctggagaagcccaagcccatcccctatatttatggcaggtgaggaaagggtgggggctggggacagagcccagcgggcaggggcggggtgagggtggagctacctcatgcctctcctccacccgtcactctccagccgaggccccacggaggcagacgagctgatgaagagagtgggtttccagtatgagggcacctacaagtgggtgaacccccacaagctctgagccctgggcacccacctccacccccgccacggccaccctccttcccgccgcccgaccccgagtcgggaggactccgggaccattgacctcagctgcacattcctggccccgggctctggccaccctggcccgcccctcgctgctgctactacccgagcccagctacattcctcagctgccaagcactcgagaccatcctggcccctccagaccctgcctgagcccaggagctgagtcacctcctccactcactccagcccaacagaaggaaggaggagggcgcccattcgtctgtcccagagcttattggccactgggtctcactcctgagtggggccagggtgggagggagggacgagggggaggaaaggggcgagcacccacgtgagagaatctgcctgtggccttgcccgccagcctcagtgccacttgacattccttgtcaccagcaacatctcgagccccctggatgtcccctgtcccaccaactctgcactccatggccaccccgtgccacccgtaggcagcctctctgctataagaaaagcagacgcagcagctgggacccctcccaacctcaatgccctgccattaaatccgcaaacagcccctcctgtccccttgtcatttgcttccctgaggacccacttccttgtcccactccccaagtcacccgggtgcttcctctgtggccactgaggagcctcctcacttctggttctgaccccatgtccagccatgaccatgtttggtgtcagagacacctcctgagtcctcctccgctccacgcatattgtcattgtgagaccagcttgaggtgcaaggatgtggggtcaccttccgctcttactgtccatgtccctgccccacccaagatgacttccagcaacactgccagtccacagaagtatttaggaaggagaggggatgggttttgtgactgatgtcagaggccaagggagaggggacagtccacagtgatgcacagccaggcccagccaccccttccaggcagaagggccacacactgggcagctctcaacataggctgattctcccagttctggaggccagagtccaagatccagcactcccgccagaggcccaaggggagggtccttcctgccctctccagctcctggggaaccaggcatcttgggctggtggtcacctcactccactcactctgcctgtcttctcgtggcctccccatggtgtgacttctatgtcctaactcagcgacatctgcagacctcctatttccaaataaggccacatcaggaactcccaggagacatgtatttgggggccgctgttcagcccctgcactgctccccacacagcccctgggtgtttcagtgcagcatgtgtcctgccagggagatggcgaaaccagacactatggtccctgcacttgtggcccgggttctaggaggtgaggccggcagggaacaaaataaccaggtggtgctgggatttgtcctttgcggagagcaaaccagtggcctggaaagtggccagggaggagtgttccacccgcagcacaggtgaggacgcgcaccctgggcgctgcaggtagcagggcccgatgtcgtagaatgaaggaggcctctggtgagacctgtggcaacagggacacatgctgcatcccggtgttcaattcttgctcttcctgtgccctgaatggggagtggcacctcttgagttttcagagggaggaagtatgccaagttcacctggaccctagatagggaaaggagcttgatgggggccaaggacaggtcacaggctcagtgggctctgtgtgcacaggattgggggccaggcttcggccacaggggcagtggttttagtcctcttgtcctggttcctgtggcctccagaaggggctgtggcaaggctgagagtcgggttgggctgggggctgatggggtgtggtaaggctaagcagggtaggttccagggcagggaacaacacccaagtaaggccaggcgcagtggctcaagcgtgtaatctcagcactttaggaagccaagatgggcagatcacttgaggccagaagttcaagaccagcctgaccaacatgacgaaaacatgtccctaccaaaaaaaatacaaaaatttgccaggcgtggtggcgggcacctgtggtcccagctactcaggaggctgaggcaggacaatcgcttgaacccgggaggtggaagaccatccactggcacctgaacccatcaggcaactgtcccttcagctctgggcgcctacttgggtggaggcaggaggtcccaggtgaggacagcactgggtccacaatgggagagaatgagagatcaggtcagggcattccactgtcacctcagttgcgggtgtccacactgagacatggacataagcccgagaaaacaacacgagctgtaccctgaacaagaaggcagtcctccccagccccttggagctcacaggagcactgaggcccttgcctgtgagcccagatccaccctggcccattccatagggtgactcactcagcctccctgacccctgctgaccggttcaaggctggagccctgttttcaccccttctctgcctgcaatgccaaagaattca

SEQ ID NO: 46 - DNA, 10461 bp, Homo sapiens
gctgaatgaagttttctgggtaatggcatgaaatgttttccttatgagaagtggtgttgagttacagcgtgcagacggagaacggggaggagagaaacggcagtctcaatctggcccccaccttttcttgggcttgtaggaaggtggacatgggctcccggagacaagacaagtgatatgttgaactgttcggtggctggaatcaactgctcctggagtgacctaaggccagtgtttatcagaacttagccagggccagccaagcaggcacagatgctctgctatgaaatgccacgcaggcagagactgacaagcggtaggaactgagctttccccttggactgctgcttcctgctgtgttcaggggagggggtcactttctggcaactctgctgctgctgctgctgctgctgctacttcagcttcctctccactcaaggtaagcaggctaagggagggcaggctgctagggaaagctttgtaccatgaacaggatccgaaagtttttccgaggaagtgggcgagtcttggcatttatctttgtagcttctgtcatctggctcctctttgacatggcagctctccgcctctcattcagtgagatcaacactcgggtcatcaaggaagacattgtgaggagggagcggataggattcagagttcagccagaccaaggaaaaattttttacagcagcataaaagagatgaaacctcccctaaggggacatgggaaaggggcatggggcaaagagaatgttagaaaaactgaggagagtgtgctcaaggttgaggtggacttggaccaaacccagagggaaagaaaaatgcagaatgccctgggaaggggcaaggttgtgccgttgtggcatcctgcacatctgcagaccctccctgtgactcctaacaagcagaagacagacgggagaggcaccaaacctgaagcctcctctcaccaggggacaccaaagcaaacgacagctcagggggctccaaagacctcattcatagcagcaaaaggaactcaggtagtcaaaatatcagtacacatgggacgtgtcagtttaaaacaggagccccggaagagtcatagtcccagcagtgacacatcaaaactagcagctgaaagggacttgaatgtgaccatcagtcttagtactgatagaccaaagcagcgatcacaggcagtagcaaacgagagggcacaccctgccagcacagcagtgccgaagtctggggaagccatggccttaaacaaaactaagactcagagcaaagaagtcaatgcaaataaacacaaagccaatacgagtcttccttttcctaagttcactgtcaattcaaatcgcttaaggaagcaatctattaatgagacacctttgggaagtttgtcaaaggatgatggagctagaggggctcatgggaagaaactcaatttctctgaaagccatcttgtgattataaccaaagaggaagagcaaaaggcagaccccaaagaggtctctaattctaaaaccaaaacaatatttcctaaagtattgggtaaaagccaaagtaaacacatttccaggaatagaagtgagatgtcttcctcttcacttgctccacatagagtgccactgtcccaaactaaccatgctttaactggagggctagagccagcaaaaatcaacataactgccaaagccccctctacagaatacaaccagagtcatataaaagcccttttacctgaagacagtggaacgcaccaggtgttaagaattgatgtgacactttctccaagggaccccaaagctccagggcagtttgggcgtcctgtagttgtcccccatggaaaggagaaggaggcagaaagaagatggaaagaaggaaacttcaatgtctaccttagcgatttgatcccagtggatagagccattgaagacaccagacctgctggatgtgcagagcagctagttcacaataacctcccaaccaccagtgtcatcatgtgctttgtggatgaagtgtggtccactctcctgagatctgttcacagtgtcatcaatcgctctcctccacacctcatcaaggagattctgctggtagatgacttcagcaccaaagactatctaaaagataatttggataaatacatgtcccagtttccaaaagttcggattcttcgcctcaaagagagacatggcttaataagggccaggctggcaggagcacagaatgcaacaggtgatgtgttgacatttttagattctcatgtggaatgtaacgttggttggttggaacctcttctggaaagagtttatttaagtagaaagaaagtggcctgtccagtaatcgaagtcatcaatgataaggatatgagttacatgacagtggataactttcaaagaggcatctttgtgtggcccatgaactttggttggagaacaattcctccagatgtcattgcaaaaaacagaattaaagaaactgatacaataaggtgccctgtcatggctggtggattgttttctattgacaaaagttacttttttgaacttggaacatacgaccctggccttgatgtttggggtggggaaaatatggagctctcattcaaggtgtggatgtgtggtggtgaaattgagatcattccctgctcccgagtgggccatatattcagaaatgacaatccatattccttccccaaagaccggatgaagacagtggagcggaacttggtgcgggttgccgaggtctggctggatgagtataaggagctgttctatggccacggagaccacctcatcgaccaagggctagatgttggcaacctcacccagcaaagggagctgcgaaagaaactgaagtgcaaaagtttcaaatggtacttggagaatgtctttcctgacttaagggctcccattgtgagagctagtggtgtgcttattaatgtggctttgggtaaatgcatttccattgaaaacactacagtcattctggaagactgcgatgggagcaaagagcttcaacaatttaattacacctggttaagacttattaaatgtggagaatggtgtatagcccccatccctgataaaggagccgtaaggctgcacccttgtgataacagaaacaaagggctaaaatggctgcataaatcaacatcagtctttcatccagaactggtgaatcacattgtttttgaaaacaatcagcaattattatgcttggaaggaaatttttctcaaaagatcctgaaagtagctgcctgtgacccagtgaagccatatcaaaagtggaaatttgaaaaatattatgaagcctgaagtgtaactgatgtttttatatagtaaacccattaaatactgtgaaaataacactgaacttggaaactatatttctcagcggtagtttaaattttcaattttaataacatttgaatggaagattttttataaatcacaatatttggaataccaaaagatgactcaggaaaacagtccaacattggactgaagtccttcttcggaactgggtggcctttgaattgcctgctttccaccctatgctagacctcatcatgcaaatttccctgtgaaagctaacaggtaactggaaatgaagacagaaggacttgagaaagcatgaggatattcccaatgactatgtttggtaataatcagctcttctggcccacaagtaggaatgatcaatgagaacttaacttagtcctttatttggggattttttcatcaaacaaaaatttcttgagttcttatggctagaagacctcagatgcccacagctgtcacgtttgtgaaatccctccagactacatgcatgcttacctaacagtttgaaatagtattgatctactgctggtaaccctgcttgatggcagcattttgatctaaattacataatggtttttcccaatctgaatcagtggaaaaaaatttaagtgaggaagaagaggccttcaaatgcttatttaattctaggtatgaacactatttcagttcattttgtgcttttaaaactacagttttaaagatttatgataccaataacttcctagattcatgtggattttttttaaggcaatgaaaaaaggctggattataacacactgtagtaatcaaaaatgcatttaagcattgaatgcactctagtgcagggccaagtaagaggagttgaaatgagtaaagcagaaatagagctgctgaaagtttcttttatataaaaataataaaatactactttagatatagtagcattcacagggatgaaatatgcgaaaaatgggttctaaaatatttcaaagggaaaatgaagtgaaggaaacatcatgaaaggggaaaggaatgaggtaaacaagtcttaggaagagagttaagaaaaaattccgctggacttggccaaagaaagaaggggatctagtatctctatgaaggaaaaaagagtaaagccctcagtgtgaacccagtgagaacactgacaaatttgggaaaagttaaatactgatttcatccaaataaagcctctaatcttaagcataccaatactttggcataccagaagacaccttagaaatcaggatagcctttgcattcattttggtaagaaaactgatgctgagaggataaattacctaaaaatcttaaaacccaggcaagttagtcaaagaatcaagattagaattcaggtttccagagacagggctcattctaatgcctcaggtcactggcccgaacaaatctgcttcacagaattccttagaaagagatacacaattctttgctgggattgggtccctggaggacaaccatactatattcttgttaatatgttttttctttttttaaatttaaacttttgttcagttgagatgattgtgaaactaggtatctttcattctgactcctagtttaacatttaattttgactcccaatgagttacgtaaaagcaaaactataactaagaatgggaaaaagaactatttctgcacatttgtaacatatttaagatgttttcttcatataattgaaaactgcagatgagtaagagaatgactaggaaatgagatacagttatatgacacataatgatgttttagtcaacaatgaaccacatatttgacattggtcccaaaagattatattaataatatggtatctttagtgtgcttttctatgtttagacacacaaatactcaccatgatgttacaatagcctacagtgttcaatacagtaacatgcacaagtttgtaacctaggagcaacagggattccatatagcctaggtgtgtagtaggctacctacaccatctaggtttgtgtaagtacactctgatattcacacaatgatgaaattgcctaatgacacatttctcagaatgtatttgtgttattaaatgatgcatgactctaattcttttcaaaacagagccatatggggcaagggggatggggggacgcaagtcagttgtcaaaagactaattgagttactgacaaactgaacatgctaggtgcctcatgtaattcttcatgtaactaaaaaatgttgagaggtttttttcccccgggtatataggctctctttttatccgaaaatagtttccacaaagaagtcaactctgttctgaaaaaaaatgaattgcattttgaatacacttatctttgggtatatcaactaaaggaagttggatttttttccttaacagaaacttctgcagtcctctcagttcacatcctttctgactttaccctgacaaacttattatataaagctatatttaaatctatattgtcaatataacaaaggattgtttttgaacatcacaaatttgttcttggatagaattttatacattgcttttcatcatatatttgctcagttactctaagaagcaaggaactgatcactagttgggaatctatatgggcctaaacttgagtgtattgatttattattacatctactaccaacattttcttaagcatagccttctaaattttttcaggagattagaataaaggtatacatgctactcggtcttctggtaattctagtgataaacctttggatgagacaggtcctaatcagcactgaattcttcaataggaggctgtgttacaggagctacagatttttccctggattagcttaggtcattgcctttactttaaaaaaaaaaaaaaaaagtctatgcatcttgttaccttgaatacaagggtggtcttgataatatttgacagcactaaccaacttaccaagccatctaagtgcttctgagacttttcagtttgcacaatttctttctccttttcaacagttacccagcgcttctgccctactctcttgtaagctgacacagttgttgttggtacaatcttgttctatcaccagcatcaaatttgcttaatactgcttgttgacatcccctcagctgtcattcacagcaaaccaccatgtgccatgatcacaatgtattattagcttcgccacactaatttggaaacattcttttagatattaaaacaccttacttctagtattagtttgggactgcagaggggcaaagataccatttacagtatataggagtccaatattcccaaccaaccttgatttcatgaatggcttgtaattatttctagcaggcactcatgcaatagaataagattgaaacatgccagagagtaccatctttctttgttttaacatctctgattgaattcctatattcagaatacaagaaaaaaaatttaccaaccaggcgcagtggctcacacctgtaatcctagcactttaggaggccaaggtgggtggatcatgaggtcaggagttcaagaccagcctgggcaacatggtgaaaccccgtctctactaaaaatacaaaaattagctgggcatggtggtgggcgcctgtaatcccagctacctgggaggctgaagcaggagaattgcttgtacccgggaggtggaggttgcagtgagctgaaattgcgccactgcactccagcctagacaacagagcaagactctatctcaaaaaataataataataatttttacctcagaagaaagccccaaaatcttggattaaaacaaaaaaatgacattgggtgatgggaaaaaagaaaggaactaattatcattgagtgtgtgtaggtactatttgtgtaggtgctatatgtgtcccatctcactgatgggtacaactcatcaaatgactctcattctccctgttatatgaacaagaaggataactcccacatacagatgaggaatttggtaaattgcccaaggtcatcccacaagtaagagataaaacccagtttccattttatctggctcaaaaaaaatttctctcactataccatgctgctatataattaattttcttctttacaaagggctgtcatctcaggtgggtgcatttaaaagtttcttggtctcagattactgatgccacagtattgagatgagattgaattaaacccctttggcctcttttggatgttgtataaacagaaaaaagaagcatggtctctctctctctgtggtaaccaattgatgtgtaggtataaacatggctacccccacatgttttgctgtgatctatctctttgacttcatgcagaacctattctttttcatctcctggaccaaatgtgaaagaaagaagtggacatgtggaggattctttctctgtgaataatattgaaaaagctccattttctggggaaatacccatggttcattgtctgatgccaagaaagaattcaggacacagacacacatgaggagtgggtttaggagtggaaagtttaatagataaagaagagagtgagaaagcttcctcatgttgagaaagacagttgctcaagagagggttttctgggtttggggcaagatttgattgatttcatacagaggcttgaggaggcggtgattgatatacatagggcccggggattggtttaaccaggtatactacttacatagccggtgaaaagactggccctcccaccctaaccttttattatgcaaatgcatcttctacctggctgtcaccatgacatttgcacacgtggcttcacttcaccagtgccatgtcacccacacacctggtgacaaggaaaagggagcaggaatcaccatattgaatgtgcctggcttccaggtacagctgctagctttacatatgggagcctctagcttgcatatctatacttgcaacttgacttttcaggctgctttttgttagaaaataagtggcttgggggctgctttttattaaaggaaaaatccaccgagaactattttaccctttctaatggcctaaaataaatttttaatgactcctgtattaatattaccaacccttgatccctccaacctttaatcaaagctagcagattgctcatcttgaacagaaataaaaagttaaaaagttggagtcctttaaaacacaaaccatgactttttattcctactcattgtgtaggttgtcactactgtgcttttgcaacaacttttgcatgggttactcaatagttgctacaagacaaaatgccttacaattagaaaaaaaaattaaccagagatattgtacaaaatatttattttttgacagttttgaataagccatataaagtattatatatccctaatgaagcttaatggatagtattccaggtgttggtggtgtctgtatctcaaagaaagaaaaaaataacatcacactaaacagatttaatgcctctgttttcaacctaatggaacaatagttatcatttcaattagagtcgctttgcaagtttatgtgaatctttgctttgtaaaaacacatacaaaacacaagggaaaattctcattttccagcaaatacagcaacttctaatatgctgtttctaataatgagtcaccatcaaataagtaataaatatttttttcaaaaacaagagctttctgttttattattgattgacagatatttaccagtttaaggatattggtcataagcatctatataataaaccctttatattagatgttaaattaaaatttttcatagcatgaatagatttttaagtgaccactcaaaaacatagcaatttttgtaaatatactgtatgtgtgtgtatatatatatatatatatatatatttttttttttgatgctttgatctggaagaaagaaatatcaagagtttctattcacaacataaagaaaataaaatgtttttagatatttttaactctttcaggtgtatagctttgtctgcatctggccttctgcacaaaagtatctcaagtgaacttacactctggataccattttccaaacttgaaggagtaatcaagttcttaattatcagggtgcttgttatttagttgaagattacacacatgtcttctgcttcaaacaactaccccaaatttgctagttttatacatattagcttaaaaacaagagaagccaaagattaagtaagtgaattgtgttaaagattgcctgaaaacatttgctaaggggagaataaaactaaaactgtggagtataaaggatgttggaattaaacatttttaagtactttttcttttgcatctgatcgactgaagttattataaagaaggaatcaagtatgtaactttaaattctaggtaaacatccaaattactttctaaattcatttccaaaattctcctgtgctggcagttagctactagagatcatcatttgattttgtagtttgccatgttctgagtgagttcagctgcttactactacccatgtcattgtgtttgtattgattgcctggctcagttatctcatgttcttcatgaactatatacacattttcattgtctttaaacaatactgagttttgaagttaagtagaatattgtaggggttatcagaaacccatattcattgtggtatgtttctgtctgatactttaatattggtaaatatagtttttgacattgcattttacaatcctattgttttttagagtgatgaaagttcaagttttaagagaagtggttgcctttctcatactgtcaaacatatttcttctttattatactctggtgctttatccttctccataattctctattattacttattttaaatgttttccctatcacattgaaaaacttaaatgtccgttctccatttgaaaatatgccaaaagtatgatcccatgtaaatatgcagaaacgattgctatgaaaatgtcagcatagtttaaatgtattactctgatgattacagagatttcttcaagttgttcgtgttaagatgcatcttaaacatgatctcagttccttaaaaaatgataaaaatttttcatgtatattacatatctacctaccagaaatcctttttacaattttatatacaatcattttaagacctttttgaaataaataatgcaaatgaactaaaaaaaaaaaaaa

SEQ ID NO: 47 - DNA, 1446 bp, Homo sapiens
tgtacacaggcagtttgttgggagcgttaccattgcctctggttcctcatgtgtaaaatggatggttcctacctggctgagttcctgctggagaaaggctatgaggtccatggaattgtacggcggtccagttcatttaatacgggtcgaattgagcatctgtataagaatccccaggctcacattgaaggaaacatgaagttgcactatggcgatctcactgacagtacctgccttgtgaagatcattaatgaagtaaagcccacagagatctacaaccttggagcccagagccacgtcaaaatttcctttgacctcgctgagtacactgcggacgttgacggagttggcactctacgacttctagatgcagttaagacttgtggccttatcaactctgtgaagttctaccaagcctcaacaagtgaactttatgggaaagtgcaggaaataccccagaaggagaccacccctttctatccccggtcaccctatggggcagcaaaactctatgcctattggattgtggtgaacttccgtgaggcgtataatctctttgcagtgaacggcattctcttcaatcatgagagtcccagaagaggagctaatttcgttactcgaaaaattagccggtcagtagctaagatttaccttggacaactggaatgtttcagtttgggaaatctggatgccaaacgagattggggccatgccaaggactatgtggaggctatgtggttgatgttgcagaatgatgagccggaggacttcgttatagctactggggaggtccatagtgtccgggaatttgtcgagaaatcattcttgcacattggaaaaaccattgtgtgggaaggaaagaatgaaaatgaagtgggcagatgtaaagagaccggcaaagttcacgtgactgtggatctcaagtactaccggccaactgaagtggactttctgcagggcgactgcaccaaagcgaaacagaagctgaactggaagccccgggtcgctttcgatgagctggtgagggagatggtgcacgccgacgtggagctcatgaggacaaaccccaatgcctgagcagcgcctcggagcccggcccgccctccggctacaatccccgcagagtctccggtgcagacgcgctgcggggatggggagcggcgtgccaatctgcgggtcccctgcggcccctgctgccgctgcgctgtcccggccgcaagagcggggccgccccgccgaggtttgtagcagccgggatgtgaccctccagggtttgggtcgctttgcgtttgtcgaagcctcctctgaatggctttgtgaaatcaagatgttttaatcacattcactttacttgaaattatgttgttacacaacaaattgtggggccttcaaattgtttttctcttttcatattaaaaatggtctttctgtgaactagcattcaca

SEQ ID NO: 48 - DNA, 3958 bp, Homo sapiens
gttcacttactggtgcccagcaccgggcactcagtgaggccttgcaatacggttcacttgttgaattgaattcgtcaattgttgagcgggccgtgctgccaggcaccgcacgttgtgtgtctgccctactctcgtggaaccaaggtccagtggagagaggaacataagcgaatgaagaaagaagcaatagagtctcagtgataagttcttggaaaaaaggtctttgccaatcctgattcccggaagagagtcggcagaattccttcctttaggcccctctggagccttggccgaccagccacttctgtggtctggggacagtcaccgagggtatcaaaaagccattcacagaggtcatccgagccaacatcggggacgcccaggctatggggcagcagccaatcaccttcctccggcaggtgatggcactatgcacctacccaaacctgctggacagccccagcttcccagaagatgctaagaaacgtgcccggcggatcctgcaggcttgtggcgggaacagcctggggtcctacagtgctagccagggtgtcaactgcatccgtgaagatgtggctgcctacatcaccaggagggatggcggtgtgcctgcggaccccgacaacatctacctgaccacgggagctagtgacggcatttctacgatcctgaagatcctcgtctccgggggcggcaagtcacggacaggtgtgatgatccccatcccacaatatcccctctattcagctgtcatctctgagctcgacgccatccaggtgaattactacctggacgaggagaactgctgggcgctgaatgtgaatgagctccggcgggcggtgcaggaggccaaagaccactgtgatcctaaggtgctctgcataatcaaccctgggaaccccacaggccaggtacaaagcagaaagtgcatagaagatgtgatccactttgcctgggaagagaagctctttctcctggctgatgaggtgtaccaggacaacgtgtactctccagattgcagattccactccttcaagaaggtgctgtacgagatggggcccgagtactccagcaacgtggagctcgcctccttccactccacctccaagggctacatgggcgagtgtggttacagaggaggctacatggaggtgatcaacctgcaccctgagatcaagggccagctggtgaagctgctgtcggtgcgcctgtgccccccagtgtctgggcaggccgccatggacattgtcgtgaaccccccggtggcaggagaggagtcctttgagcaattcagccgagagaaggagtcggtcctgggtaatctggccaaaaaagcaaagctgacggaagacctgtttaaccaagtcccaggaattcactgcaaccccttgcagggggccatgtacgccttccctcggatcttcattcctgccaaagctgtggaggctgctcaggcccatcaaatggctccagacatgttctactgcatgaagctcctggaggagactggcatctgtgtcgtgcccggcagtggctttgggcagagggaaggcacttaccacttcaggatgactatcctccctccagtggagaagctgaaaacggtgctgcagaaggtgaaagacttccacatcaacttcctggagaagtacgcgtgaggacgcctgagccccagcgggagacctgtccttggctcttcctcccaatgcccgtcaggctgaactcgcctcccccgtgactctgcctcgggcctcgcagaggccgctggtcacttcgtcatcattttgcccctggagacgtctttctttgtgccttgatgttgagagcgcctctcttttgagcaaacaagcattctatatgcaaccagagtagaggggacctgctcagcaggtgtgaccagggttctctgaatctgttattgtttttgcttctggaaagttcatttggggtttacaacaactaggatgtgttgggtgagatgtttcagatctggagaaatgagcaggtgtcgggaaatgtgtgacttaaccgtggtgagggctggaaatccaaactcaccaccatgatctgtgaaataaagcccttagcggtgtgaagcatccggtcctttgaacagaagggcctggaaggcccctggggctgagaaagggtccgcccggtggcctggaggcaggcgccgggagcgcagtagcacgtggactgggcaggatgttgcactagcttggggtagatgctgggggctgcggccacggtcagagggccccactgtgaggcgtgggtgtgagccaggctgcaggaggaactgggcctccgcttcccagcaacgcagccaggcctgagaattctgtgcgcccggcgggctttgggaatgaggggttcccttgaacatgcgtaggctggaaccccgtctgagaggtctccctgaatttcagtgacacatagtgcagcccggcagtgtcccacttccgtggagagagccgctggaatggtgtggacccatcccgcgggtgaccggtgcctgttctcccctgaccgagcctgtgagcacatcgccccctgctggcgacagcggggaaatgagggctgaaaatatcctccccacaagggcaatccccgggacctgccgagcagccaaggccctgtcctttcttgaatggtggcgagctgaatctggtcggtttcctagcttttaggtggtaaaagtgcctggcagcttggctgccgtggaggagtcagtcgtggttggaggttcattgccgtgctttcatgcagagtgttttgccttcatgttagcttccggctcccctcccaggctgcagactctgacctgtggcatcaggcttctcccagtacaggagggtgccatcccccagcatgcggcttctctgccattagcagccctgggcgggccgaccacactcgaggctgcggtgctacgggcttagccctcgcctccctcactgggagcttccccatcctccctgccttccccagtgggaagttagggaagctcaggagcctgggaccccgcatgtcccaaaatgggattggagaagctggagagaaagcagaagaggccgaggagtgaggcagcagcctctatgctgtgatttccacaccgggtccgtgcagaggaaacagaaactcccaactgtccttacccaccgacatcacagcccctatgaagaaagtagccacaatctcaaataacaaaagggaatgttctaaaactttttcttccttaaaaaatggagaaaattgcacttgtgcttgctgtgtggtatataaaccaggattagtcccagggtcgtgaggtttctggtgaaaaggttaaatcgtagaagctagtatattttttatatttttgtaacaattgcttttttcatgggggaggcggggttagtatttatagtcctaacaagtccagtaattttttataaatcttcagattataaacagcccctaaaaactttacaacgtttacacagttttttaaaaagagactgtatacacttgatttgctttcaaaataaataaggtcagctagtctaggaggttaacgtcgggtaggaatgctgatcatgataggtttggttttctacagattctgttccggtgcctttcctatccaggcaccacctgagaaagttgtcatttgaggtcgcacttggaagttacatctgtgaagtttctgtcattcgtccagatctgtgtgtgtagcatgtgctgaggaagcacgtgctgggctgtgcctcagacagtgcatcaccgggcacccagaggcttgcctggctattcctgttctggtgtgtgtggagtgttggggaggaacagatgcagatcaacctgtggctgttttcccgtctaggttctcacaggtatctcctgacagaggtacttaacaatggctctgctggaaatttctataaataaaatgtccaaaatggtgactgcgttt

SEQ ID NO: 49 - DNA, 1186 bp, Homo sapiens
ggctggggcggagctggaccgttgagggccacggcggggcgtctccgggccgagcggggctgctgcgcccgagcggttgggggcgcggagggctggaaatcccggatcacgcgcccccgggcgccgccccgcccccgcaccttggcctagcgcggtggcgtcacagtcgcgcagtcctgactacggcctccgggccctttgtccccgctagcggcgctcggggtgggggagccaggaggggcgggagacgggcgggtatgggccgcgcgggcgcaggctcccccgggcgccgcaggcagcggtgccagagccggggcaggcggcggccgcgagcccctcggcggcggaaggccccagcgtgcaggcgcaggagggcgcggcgccggcggaagaagccctgtccccgcagcttgcgaccggagatccacgaatgtcccaagtcccaggacccgtgcgcgtcccgggacgactggcgctgtgcgcgctccatgcacgagttttccgccaaggacatcgacgggcacatggttaacctggacaagtaccggggcttcgtgtgcatcgtcaccaacgtggcctcccagtgaggcaagaccgaagtaaactacactcagctcgtcgacctgcacgcccgatacgctgagtgtggtttgcggatcctggccttcccgtgtaaccagttcgggaagcaggagccagggagtaacgaagagatcaaagagttcgccgcgggctacaacgtcaaattcgatatgttcagcaagatctgcgtgaacggggacgacgcccacccgctgtggaagtggatgaagatccaacccaagggcaagggcatcctgggaaatgccatcaagtggaacttcaccaagttcctcatcgacaagaacggctgcgtggtgaagcgctacggacccatggaggagcccctggtgatagagaaggacctgccccactatttctagctccacaagtgtgtggccccgcccgagcccctgcccacgcccttggagccttccaccggcactcatgacggcctgcctgcaaacctgctggtggggcagacccgaaaatccagcgtgcaccccgccggaggaaggtcccatggcctgctgggcttggctcggcgcccccacccctggctaccttgtgggaataaacagacaaattagcctgctggataaaaaaa

SEQ ID NO: 50 - DNA, 1155 bp, Homo sapiens
tgtcccctctccggagctcttatactctgagccctgctcggtttaggcctgtctgcggaatccgcaccaaccagcaccatgcccatgatactggggtactgggacatccgcgggctggcccacgccatccgcctgctcctggaatacacagactcaagctatgaggaaaagaagtacacgatgggggacgctcctgattatgacagaagccagtggctgaatgaaaaattcaagctgggcctggactttcccaatctgccctacttgattgatggggctcacaagatcacccagagcaacgccatcttgtgctacattgcccgcaagcacaacctgtgtggggagacagaagaggagaagattcgtgtggacattttggagaaccagaccatggacaaccatatgcagctgggcatgatctgctacaatccagaatttgagaaactgaagccaaagtacttggaggaactccctgaaaagctaaagctctactcagagtttctggggaagcggccatggtttgcaggaaacaagggcttggagaagatctctgcctacatgaagtccagccgcttcctcccaagacctgtgttctcaaagatggctgtctggggcaacaagtagggccttgaaggccaggaggtgggagtgaggagcccatactcagcctgctgcccaggctgtgcagcgcagctggactctgcatcccagcacctgcctcctcgttcctttctcctgtttattcccatctttactcccaagacttcattgtccctcttcactccccctaaacccctgtcccatgcaggccctttgaagcctcagctacccactatccttcgtgaacatcccctcccatcattacccttccctgcactaaagccagcctgaccttccttcctgttagtggttgtgtctgctttaaagggcctgcctggcccctcgcctgtggagctcagccccgagctgtccccgtgttgcatgaaggagcagcattgactggtttacaggccctgctcctgcagcatggtccctgccttaggcctacctgatggaagtaaagcctcaaccacaaaaaaaaaaaaaaaaaaaaaaaaaaaaaaaaaaaaaaaaaaaaaaaaaaaaaaaaaaaaaaaaaaaaaaaaaaaaaaaaaa

SEQ ID NO: 51 - DNA, 4144 bp, Homo sapiens
ggttggttctgagaaggcttcaaggaataggcagacatttcagcaaggctgctgaggaaggataggctgtggaaattaggatgcagcactcctgcccgggtcccgcctcggggtcgccaggccctgaaccccaacgccggcattagtcgcgcctgcgcacggccctgtggagccgcggaggcaagggacggagaacggggcggaggcggagtcagggcgcccgcgcgtgggccccgcccccttatgtcgggtataaagcccctcccgctcacagtttccctagtcctcgaaggctcggaagcccgtcaccatgtcgtgcgagtcgtctatggttctcgggtactgggatattcgtgggctggcgcacgccatccgcctgctcctggagttcacggatacctcttatgaggagaaacggtacacgtgcggggaagctcctgactatgatcgaagccaatggctggatgtgaaattcaagctagacctggactttcctaatctgccctacctcctggatgggaagaacaagatcacccagagcaatgccatcttgcgctacatcgctcgcaagcacaacatgtgtggtgagactgaagaagaaaagattcgagtggacatcatagagaaccaagtaatggatttccgcacacaactgataaggctctgttacagctctgaccacgaaaaactgaagcctcagtacttggaagagctacctggacaactgaaacaattctccatgtttctggggaaattctcatggtttgccggggaaaagctcacctttgtggattttctcacctatgatatcttggatcagaaccgtatatttgaccccaagtgcctggatgagttcccaaacctgaaggctttcatgtgccgttttgaggctttggagaaaatcgctgcctacttacagtctgatcagttctgcaagatgcccatcaacaacaagatggcccagtggggcaacaagcctgtatgctgagcaggaggcagacttgcagagcttgttttgtttcatcctgtccgtaaggggtcagcgctcttgctttgctcttttcaatgaatagcacttatgttactggtgtccagctgagtttctcttgggtataaaggctaaaagggaaaaaggatatgtggagaatcatcaagatatgaattgaatcgctgcgatactggcatttccctactccccaactgagttcaagggctgtaggttcatgcccaagccctgagagtgggtactagaaaaaacgagattgcacagttggagagagcaggtgtgttaaatgggactggagtccctgtgaagactgggtgaggataacacaagtaaaactgtggtactgatggacttaaccggagttcggaaaccgtcctgtgtacacatgggagtttagtgtgataaaggcagtatttcagactggtgggctagccaatagagttgggacaattgcttactcattaaaaataatagagccccacttgacactattcactaaaattaatctggaatttaaggcccaacattaaacacaaagctgttgaaatattgatgaaaatgtaagaatttttgtgaccacggggtaggagaagtttctttaaagacgtaaaaagaaaaaaaccataggctgctctgcctgtggagtagccattctttattcttttactttttaaaataataacaatcacaaaggaaagatttgccaattgaataggatcaaattctacaacttttcctaaggcacccacaaataaatgacaagtgagacaaaaagcactagtataaagattatataaagacctataaatcattaagacaactgagtttttaaaaatggacaaaatccatgaacaatttataaaatagaaatatagccaaaaatgtctaaaagatgtttatgatgtaaggaattatcaattacaacagtgagaaaccatatttccttctatccgatgagtaaaaagtttctaaagtgttggcaaggcttaggaaagtgatatgcatttcctgctggtcaagttgtaaattagtatagctactttggaggacaattgtaaaatttaaatcatatcctatgacccagcaattccatgctataaaaactcatccatggccgggcttggtggctcacgcctgtaatcccagcactttgggaggctgaggtgggcagatcacgaggtcaagagatcgagaccatcctggccaacatgatgaaaccccgtttctactaaaaatacaaaaattagctgggcatggtggcatgtgcctatagtcccagctactcaggaggctgaggcaggagaattgcttgaacctgggaggcagaggttgcagtgagccgagatcacgccactgcactccagcctggctacagggcgagactctgtctcaaaaaaaaaaaaaaaaaaaaaaaaaaaacattcaaagagacatatactaagatgttcactgtggcattgtctgtaatgacaaataagtggaaaccgtgtaaatacctgtcaatactatggagtaccatgtggcaacggaagaatgagactgaactgtgtgaactaacatgcaaagatccccaaaacaggccaggtgtggttgctcacagctgtaataacaacaccttcagaggctgaggtgagaggatcagttgaggccaggagtttaagaccagcctgggcaacatagtgagacccctgtctcccaaaaattttttttaattagctgtgcgcaattgctcatgcatagtcccagctacccaggaggctgaggtgggaggatcacttgagcccaggaatttgaagctgcagtgagctgtgttcttgccactgcactccaatctgggtgactgagcaagaccctgtctcttaaaaaaataaaaaagatctccaagcatagagaagagtctggagggaaacaccaaactcataacagtcttactgcaggcaagtgggataaaggcccagactccatggtggaagttaaagggcatttccaagttaaggctaagacttgcttttctaactaagagaatgtgctcatgcattgcttgtgtagtagaaactagtttttagaaaagaaagcaaacttaagaaacactgactcctgtggagatgacttggcaccactctcctttcacagagcagagtctgaatagtcttcagagataggcctgtgggccagattgccatcccctatggaccagaagccaaggatctctctagtgatggtcagagggcccaaatggcagggatacccagtgatgtcaggaggaatagtacagacagaaggtgctaagcagacaattcaactgccatgttttgccaccccctgtgagcagggattaggtgttcaggccagtatcttgggcatgggggagcctttggccagaagaggtataaagctcagaagtttttcagtctgataactattgatataatttccatagtgtgagggagcggtatgctctacccttgtgtatttaaggcaggacagagaaattgaggatgcccctggggctagatcgatgatatgaccagaaatcaaaaagggaatgcattatttattgctgtgtaacactgttaagagaggaggtagttaagggatggataggcacatagagagggaaggtctcaggagaagggatagaaaggaactatgttcacaagaacaacggcaagacagtgcctatactgcctctacagttaataggaaaaacggaagaagttacccttaagctaggatgttgctcagaagtgaccatcccaactttggtgcgggcacaataaatcagcctaaatgtccctaatttaacccagctcattataatgtcattaaacatgacattagcattgtggttttagcacccccatgggttttgcttaggcactcatgggtaataaccaagatggagtccctttggcaaaacttaggcatgcacagctgtagtaccccaagaagaaaatgttacttctctcatctgggcaaaacccacagaagacttcccagcttctgccacataaaagacacagaacacagacgccttactggcaacctgctttcaagacccctgtctttgctgagagctttcctttttcccaataaattctactctgccctactcactctcaaaaaaaaaaaaaaaaa

SEQ ID NO: 52 - DNA, 1372 bp, Homo sapiens
aagctggcgaggccgagcccctcctagtgcttccggaccttgctccctgaacactcggaggtggcggtggatcttactccttccagccagtgaggatccagcaacctgctccgtgcctcccgcgcctgttggttggaagtgacgaccttgaagatcggccggttggaagtgacgaccttgaagatcggcgggcgcagcggggccgagggggcgggtctggcgctaggtccagcccctgcgtgccgggaaccccagaggaggtcgcagttcagcccagctgaggcctgtctgcagaatcgacaccaaccagcatcatgtccatgacactggggtactgggacatccgcgggctggcccacgccatccgcctgctcctggaatacacagactcaagctacgaggaaaagaagtatacgatgggggacgctcctgactatgacagaagccagtggctgaatgaaaaattcaagctgggcctggactttcccaatctgccctacttgattgatggggctcacaagatcacccagagcaacgccatcctgtgctacattgcccgcaagcacaacctgtgtggggagacagaagaggagaagattcgtgtggacattttggagaaccaggctatggacgtctccaatcagctggccagagtctgctacagccctgactttgagaaactgaagccagaatacttggaggaacttcctacaatgatgcagcacttctcacagttcctggggaagaggccatggtttgttggagacaagatcacctttgtagatttcctcgcctatgatgtccttgacctccaccgtatatttgagcccaactgcttggacgcctttccaaatctgaaggacttcatctcccgctttgaggtttcctgtggcataatgtgatggtcaattttctgcatcaacttgactgggctaagggatgctcagatggcaggtaaaatcattgtgcttgtgagggtgtttccagaagagatttgcctttgaatcagaagacagcaaagatttccttcagcaatgaaggaggcatccaccaaactgtcagggcccagagagaagaaaaagacaggaagggtgaatttgacctctctgactgggacatccatctctgcctatcctgggacctccacactcctggttctctggccttcagacttgatcagggactaacaccatcgcctcccacccccacctttgttctgaggcctttagcctctgaatgataccactggctttcctgcttctctatcctgcagtcggcagatcatgggacttcttcactccaaaattgtgtgagccaattcccataacagatagataaatttataaataaacacacaaatttcctacagcct

SEQ ID NO: 53 - DNA, 1070 bp, Homo sapiens
aaggatgactcctagacctgtctttgtcccatacttgggaagataagctgttagtttacattgccaagatgaaattcaactgatctgttttagagtaaagatcttgcgggccaacaaggaatttccttggggaggtgtgtggcctttgatctttgtagctatttagcaacaaaatgggaggcagtgttgcctgactcagtttccaagcttgactcttccctttggcatagtgagtttggagtcaagagatttttattttcccttcacaagctgaacaggagcctttggagagaacgctctggaccggaagcgcgcccccggggccggtcccggagggctcgatccgcatctacagcatgaggttctgcccgtttgctgagaggacgcgtctagtcctgaaggccaagggaatcaggcatgaagtcatcaatatcaacctgaaaaataagcctgagtggttctttaagaaaaatccctttggtctggtgccagttctggaaaacagtcagggtcagctgatctacgagtctgccatcacctgtgagtacctggatgaagcatacccagggaagaagctgttgccggatgacccctatgagaaagcttgccagaagatgatcttagagttgttttctaaggtgccatccttggtaggaagctttattagaagccaaaataaagaagactatgctggcctaaaagaagaatttcgtaaagaatttaccaagctagaggaggttctgactaataagaagacgaccttctttggtggcaattctatctctatgattgattacctcatctggccctggtttgaacggctggaagcaatgaagttaaatgagtgtgtagaccacactccaaaactgaaactgtggatggcagccatgaaggaagatcccacagtctcagccctgcttactagtgagaaagactggcaaggtttcctagagctctacttacagaacagccctgaggcctgtgactatgggctctgaagggggcaggagtcagcaataaagctatgtctgatattttccttcactaatatgaataaaaaaaaaaaaaaa

SEQ ID NO: 54 - DNA, 5118 bp, Homo sapiens
ctccttgctgctgctgccgccgccaatcctggtccggttgcccgagttcccggaggtctctcgcgggacctctctcaccgccaccgctcctactctcgggcttccaaatctggggcgatgtctccccaggttaaattaccctagctcctgctccagatcgcttccccgtgccccgccagagcccagtagttcaaaaattaaatttggggcaaggggtgcgcgccagagcgcagctgtttctggagcctgcggcagcggtggcgagccacagggcggcgaccgtgagctccgggagctgcgcaaaccacctggagaccatgtctggggatgcgaccaggaccctggggaaaggaagccagcccccagggccagtcccggaggggctgatccgcatctacagcatgaggttctgcccctattctcacaggacccgcctcgtcctcaaggccaaagacatcagacatgaagtggtcaacattaacctgagaaacaagcctgaatggtactatacaaagcacccttttggccacattcctgtcctggagaccagccaatgtcaactgatctatgaatctgttattgcttgtgagtacctggatgatgcttatccaggaaggaagctgtttccatatgacccttatgaacgagctcgccaaaagatgttattggagctattttgtaaggataggaagaaaagaaagtttatacctggttaattcgtcactgaaaacaattttctgtatccttttatatatagtagactacaagctaaattttttatcatctaagttaacatgtctataaactaaattcattattactagctatttttaataagttattgagatataattcatatgccacaaaattcacccttttccagtgtacaattcactggcttttagtatattaagtgagttgtgcaactatcaccagtatttaatttcagagcgttttttttatcatcccccagaaaaactgctcacttgtaagctgtcattttccatttcttctcaatccctgtggctgtacgcagccactgatctgctttctgtctctatggattgacttattctagacacttcatataagtggaatcatacaacatgtagcatttcatgagctattttcacataccataatgttcttaaggttcatccttcattcttttttatggctaaataatattccatgtgtgaatacgcacattttgtttatccacatctgggaaggttccactcttggaactaatatggataatgttgctgtgaacaccatgcaggtttttgcatgaatatacgttgttatttctcttggatttgctagctgatttagcatgtttactaacatgccattttagttgtaaccaccattctttcacacttgggaactgattatccctgactcaggatgcctcgttaagtgtattagtgctgttgctagttgggttacttccttcatcatccaattctgacagctgctaatatttgctgtacttctttcaatagctttctgatataccctttcccatcacataaataatagaataataattattcttattatttaaaaattaattttactcttctccaattataaagtaatacttgttcattagagagaatttggaaaatacaggaaaacatagaaactaaggaaaaaaaattataatcccactacccagaaacaaccactgttattatcttggggacttttttgtttttgttttctgtccttttctgctatgtatattttatgtagttgaaacttggttactattatgatgtaaatattccccacaccccctgccattttattttgagacagggttttactctgttgcccaggctggaatgcagggtgcaatcacgcctcactgcaaccttgaactcctgagctcaagggagcctcccaactcagtctcctgagtagctgggactacaggcatgtgccaccatgcctagctagttttctttttaacttttgtagagacagggtctccctctgttgcccaggctggtgtcgaactcctgggctcaagtgacccacttgtctttgccttccaaaatgttggcattacaggtgtgagccaccacacctggccaatttttataaactctgtaaatgcttatttacatatataagagtgttccttagagcagcagcattatttgtgatgatgacaaattaggaaacaatattcattagatggtgagtggttaagtaaatcatgtctgtcttgtggaattctgtggaacggctgaaaatgaatgaggtaaatctatgtgtactgacattaaaagattgcctagaaatattaaatgaatcacacagtaatacaggtggtatgatcccattttagcagaagaaaacaaaactgaaccatgcaggtgtgcacatacatgtaaataagtggctagaaaagtatctagagagaaacacatccacctcctagtaatgtctcacactgggaagggggctgattagaattagggtgggtaagaaaagtggttaagggcagggaccgggagggaagattttgtcttttacattattttctgtgtttgattttttttttaatgatgggaatgtatttctgtattaaatatgtaagttttaaaagtagaaaaaaacacttttttttttttttttttgggacggagtctcgctctgtcgcccaggctggagtgtagtggtgctatctcggctcactgcgagctccacctcccaggttcatgccattctcctgcctcagcctcccaagtagctgggactacaggcacccgccaccacgcccggctaatttctttttgtatttttagtagagatggggtttcactgtgttagccaggatggtctccatctcctgaccttgtgatccatctgcctcggcctcccaaagtgctgggattacaggcgtgagccacctcacccggccgaaaacacttttaatgtctgcatactttgccatgtttataaaccataaagttatttatccagcacactaattaggagtgtttagatggttttcagtcctttactgttttgaatggtgctgcagggaacatcagcttctttgcataaaaagcattttctctattttagaatatgttcttaagctggactctcaggaatggaattaccagatcaaagggtataatgagcacattggaggcttggactgtatttcactaaattgcttcccaaaagacttgtgttgtttgcccctcaccagcagtatgtgaaaatgctctttgccctatatccttttcactggtgggagacttcattcaaaaagatatttgtttgttgaataatatttgctgtggagatacactgtagttcctcattgttgacttaatgcatatttctttgatggccagggaagtggaaggttttcccggaagtatgtcatcccttgctcctggtcttgcaaaatttgtctgttcagttcaggggctttgcctatctggccatcagagtcttactaattttctttgttgatttgtaaaagttccttttaaagcgttccttgtatagaaaagatatttgactggttttaaaacacatttttgttttcttttgacttttaatttggcttatatatttttgcatatggaagtacagcatttgaaagtattgtgctataaggctttccttatatgtgctatgatttcctccactgttttatgtgtaggaagtcctctccccacttcagagacttgataaatattcatttatattttcatctaccaccaatcactttacagacatttgactggtcaagcattaccctcctagcttttccccccacactatcttacaaatatattgtgatttgttttagtttttgttttttgtttttgagacagggtctcactctgtcactcaggctggagtgcagtggcatgatcatggctcactgcagcctcgacctctcaggctcaggtgatcttcctaccttagcctcctgagtgtctaggactacaggcaccactatgcctggctaattttgtgtattttttgtagagatgggattttgccatgttgcccagactggtctcgaacttctgggctgaagcgatccttccaccttggtctcccaaagtactaggataaaaggtgtgagccaccacacccagccctacaaatatattttgaagatacgaattaagctcattaaaaggatgccagcatagaattttcagagtggtcctttaatccccaaattttgacagttgtattctgcaccttcatggagaatctaggtcataactgatgggcagcaggaggggcatgttctgctgcaggtcctccctctaaggctccttcccagaggagaaaatggtcttaaatatgccctaggtttgttccacaccctaggtttgttttacagggaactgggtcatcacatggttagctcagcctcagctatatcattttagcagggatctgagatttgaaatcttaagaacctccatttatcttttatgagctcaaaacatttctgccctccaaaagacttgaatagacatttctcaaaagaagacacacaaatggcaaacagacatatgaaaaggtgctcagcatcattgatcatcagagaaaggcaaatcaaaactacaatgagatatcatctcaccccagttaaaatggcttacatccaaaagacaggcaataacgaatactggtgaggatgtggagaaaagggaaccctcgttcactggggcgggaatgttaattagtataaccattgtggagaacagtttggaggttcctcaaaacactaaaaattgagctaccatatgatccagcaatcccactgctgggtacacacccaaaagaaaggaaatcagtatatcaaagagatacctggacccttatgtttgttgcagcactgtttacaatagctaagatttgaaagcaacctaagtgtgcacgaataaggaatggataaagaaaatgtgatacaggccgggtgtggtggctcactcctgtaatcccagtactttgggaggccaaggctagcggatcacttaaggtcaggagttcgagaccagcctggccaacatggtgaaaccctgtctctactgaaaatacaaaaattagctggcatgg

SEQ ID NO: 55 - DNA, 3973 bp, Homo sapiens
gggctgggggagggtatataagccgagtaggcgacggtgaggtcgacgccggccaagacagcacagacagattgacctattggggtgtttcgcgagtgtgagagggaagcgccgcggcctgtatttctagacctgcccttcgcctggttcgtggcgccttgtgaccccgggcccctgccgcctgcaagtcggaaattgcgctgtgctcctgtgctacggcctgtggctggactgcctgctgctgcccaactggctggcaagatgaagctctccctggtggccgcgatgctgctgctgctcagcgcggcgcgggccgaggaggaggacaagaaggaggacgtgggcacggtggtcggcatcgacctggggaccacctactcctgcgtcggcgtgttcaagaacggccgcgtggagatcatcgccaacgatcagggcaaccgcatcacgccgtcctatgtcgccttcactcctgaaggggaacgtctgattggcgatgccgccaagaaccagctcacctccaaccccgagaacacggtctttgacgccaagcggctcatcggccgcacgtggaatgacccgtctgtgcagcaggacatcaagttcttgccgttcaaggtggttgaaaagaaaactaaaccatacattcaagttgatattggaggtgggcaaacaaagacatttgctcctgaagaaatttctgccatggttctcactaaaatgaaagaaaccgctgaggcttatttgggaaagaaggttacccatgcagttgttactgtaccagcctattttaatgatgcccaacgccaagcaaccaaagacgctggaactattgctggcctaaatgttatgaggatcatcaacgagcctacggcagctgctattgcttatggcctggataagagggagggggagaagaacatcctggtgtttgacctgggtggcggaaccttcgatgtgtctcttctcaccattgacaatggtgtcttcgaagttgtggccactaatggagatactcatctgggtggagaagactttgaccagcgtgtcatggaacacttcatcaaactgtacaaaaagaagacgggcaaagatgtcaggaaagacaatagagctgtgcagaaactccggcgcgaggtagaaaaggccaaacgggccctgtcttctcagcatcaagcaagaattgaaattgagtccttctatgaaggagaagacttttctgagaccctgactcgggccaaatttgaagagctcaacatggatctgttccggtctactatgaagcccgtccagaaagtgttggaagattctgatttgaagaagtctgatattgatgaaattgttcttgttggtggctcgactcgaattccaaagattcagcaactggttaaagagttcttcaatggcaaggaaccatcccgtggcataaacccagatgaagctgtagcgtatggtgctgctgtccaggctggtgtgctctctggtgatcaagatacaggtgacctggtactgcttgatgtatgtccccttacacttggtattgaaactgtgggaggtgtcatgaccaaactgattccaaggaacacagtggtgcctaccaagaagtctcagatcttttctacagcttctgataatcaaccaactgttacaatcaaggtctatgaaggtgaaagacccctgacaaaagacaatcatcttctgggtacatttgatctgactggaattcctcctgctcctcgtggggtcccacagattgaagtcacctttgagatagatgtgaatggtattcttcgagtgacagctgaagacaagggtacagggaacaaaaataagatcacaatcaccaatgaccagaatcgcctgacacctgaagaaatcgaaaggatggttaatgatgctgagaagtttgctgaggaagacaaaaagctcaaggagcgcattgatactagaaatgagttggaaagctatgcctattctctaaagaatcagattggagataaagaaaagctgggaggtaaactttcctctgaagataaggagaccatggaaaaagctgtagaagaaaagattgaatggctggaaagccaccaagatgctgacattgaagacttcaaagctaagaagaaggaactggaagaaattgttcaaccaattatcagcaaactctatggaagtgcaggccctcccccaactggtgaagaggatacagcagaaaaagatgagttgtagacactgatctgctagtgctgtaatattgtaaatactggactcaggaacttttgttaggaaaaaattgaaagaacttaagtctcgaatgtaattggaatcttcacctcagagtggagttgaaactgctatagcctaagcggctgtttactgcttttcattagcagttgctcacatgtctttgggtgggggggagaagaagaattggccatcttaaaaagcgggtaaaaaacctgggttagggtgtgtgttcaccttcaaaatgttctatttaacaactgggtcatgtgcatctggtgtaggaagttttttctaccataagtgacaccaataaatgtttgttatttacactggtctaatgtttgtgagaagcttctaattagatcaattacttattttaggaaatttaagactagatactcgtgtgtggggtgaggggagggagtatttggtatgttgggataaggaaacacttctatttaatgcttccagggatttttttttttttttttaaccctcctgggcccaagtgatccttccacctcagtctcccagctaattgagaccacaggcttgttaccaccatgctcggcttttgcattaatctaagaaaaggggagagaagttaatccacatctttactcaggcaaggggcatttcacagtgcccaagagtggggttttcttgaacatacttggtttcctatttccccttatctttctaaaactgcctttctggtggctttttttaaaattattactaatgatgcttttatagctgcttggattctctgagaaatgatggggagtgagtgatcactggtattaactttatacacttggatttcatttgtaactttaggatgtaaaggtatattgtgaaccctagctgtgtcagaatctccatccctgaaatttctcattagtggtactggggtgggatcttggatggtgacattgaaactacactaaatcccctcactatgaatgggttgttaaaggcaatggtttgtgtcaaaactggtttaggattacttagattgtgttcctgaagaaaagagtccaggtaaatggtatgatcaataaaggacaggctggtgctaacataaaatccaatattgtaatcctagcactttgggaggccaaggcgggtggatcacaaggtcaagagatagagaccatctttgccaacatggtgaaactccatctctactgaaaatacaaaaattagctgggcgtggtagtgcaagctgaaggctgaggcaggagaatcactcgaacccgggaggcagaggttgcagtgagccgagatcacaccactgtactccagcccggcactccagcctggcgacaagagtgagactccacctcaaaaaaaaaaaaaagaatccaatactgcccaaggataggtattttatagatgggcaactggctgaaaggttaattctctagggctagtagaactggatcccaacaccaaactcttaattagacctaggcctcagctgcactgcccgaaaagcatttgggcagaccctgagcagaatactggtctcaggccaagcccaatacagccattaaagatgacctacagtgctgtgtaccctggggcaatagggttaaatggtagttagcaactagggctagtcttcccttacctcaaaggctctcactaccgtggaccacctagtctgtaactctttctgaggagctgttactgaatattaaaaagatagacttcaactatgaaa

SEQ ID NO: 56 - DNA, 1818 bp, Homo sapiens
tccccggcaaggcccaatggggcggcaggcccggcagccccgccccggtggtgcccgcgcggccagcgcccgccaggcccagcgttagcccgcggccaggcagccgggaggagcggcgcgcgctcggacctctcccgccctgctcgttcgctctccagcttgggatggccggctacctgcgggtcgtgcgctcgctctgcagagcctcaggctcgcggccggcctgggcgccggcggccctgacagcccccacctcgcaagagcagccgcggcgccactatgccgacaaaaggatcaaggtggcgaagcccgtggtggagatggatggtgatgagatgacccgtattatctggcagttcatcaaggagaagctcatcctgccccacgtggacatccagctaaagtattttgacctcgggctcccaaaccgtgaccagactgatgaccaggtcaccattgactctgcactggccacccagaagtacagtgtggctgtcaagtgtgccaccatcacccctgatgaggcccgtgtggaagagttcaagctgaagaagatgtggaaaagtcccaatggaactatccggaacatcctgggggggactgtcttccgggagcccatcatctgcaaaaacatcccacgcctagtccctggctggaccaagcccatcaccattggcaggcacgcccatggcgaccagtacaaggccacagactttgtggcagaccgggccggcactttcaaaatggtcttcaccccaaaagatggcagtggtgtcaaggagtgggaagtgtacaacttccccgcaggcggcgtgggcatgggcatgtacaacaccgacgagtccatctcaggttttgcgcacagctgcttccagtatgccatccagaagaaatggccgctgtacatgagcaccaagaacaccatactgaaagcctacgatgggcgtttcaaggacatcttccaggagatctttgacaagcactataagaccgacttcgacaagaataagatctggtatgagcaccggctcattgatgacatggtggctcaggtcctcaagtcttcgggtggctttgtgtgggcctgcaagaactatgacggagatgtgcagtcagacatcctggcccagggctttggctcccttggcctgatgacgtccgtcctggtctgccctgatgggaagacgattgaggctgaggccgctcatgggaccgtcacccgccactatcgggagcaccagaagggccggcccaccagcaccaaccccatcgccagcatctttgcctggacacgtggcctggagcaccgggggaagctggatgggaaccaagacctcatcaggtttgcccagatgctggagaaggtgtgcgtggagacggtggagagtggagccatgaccaaggacctggcgggctgcattcacggcctcagcaatgtgaagctgaacgagcacttcctgaacaccacggacttcctcgacaccatcaagagcaacctggacagagccctgggcaggcagtagggggaggcgccacccatggctgcagtggaggggccagggctgagccggcgggtcctcctgagcgcggcagagggtgagcctcacagcccctctctggaggcctttctaggggatgtttttttataagccagatgtttttaaaagcatatgtgtgtttcccctcatggtgacgtgaggcaggagcagtgcgttttacctcagccagtcagtatgttttgcatactgtaatttatattgcccttggaacacatggtgccatatttagctactaaaaagctcttcacaaaaaaaaaaa

SEQ ID NO: 57 - DNA, 1404 bp, Homo sapiens
aggcgtcacttcccacgcgacttcctgcgggaaacatggcggcattgagcggagtccgctggctgacccgagcgctggtctccgccgggaaccctggggcatggagaggtctgagtacctcggccgcggcgcacgctgcatcgcggagccaggccgaggacgtgagggtggagggctcctttcccgtgaccatgcttccgggagacggtgtggggcctgagctgatgcacgccgtcaaggaggtgttcaaggctgccgctgtcccagtggagttccaggagcaccacctgagtgaggtgcagaatatggcatctgaggagaagctggagcaggtgctgagttccatgaaggagaacaaagtggccatcattggaaagattcataccccgatggagtataagggggagctagcctcctatgatatgcggctgaggcgtaagttggacttatttgccaacgtagtccatgtgaagtcacttcctgggtatatgactcggcacaacaatctagacctggtgatcattcgagagcagacagaaggggagtacagctctctggaacatgagagtgcaaggggtgtgattgagtgtttgaagattgtcacacgagccaagtctcagcggattgcaaagttcgcctttgactatgccaccaagaaggggcggggcaaggtcactgctgtccacaaggccaacatcatgaaacttggggatgggttgttcctgcagtgctgtgaggaagttgctgaactgtaccccaaaatcaaatttgagacaatgatcatagacaactgctgcatgcagctggtgcagaatccttaccagtttgatgtgcttgtgatgcccaatctctatgggaacattattgacaatctggctgctggcctggttgggggagctggtgtggtccctggtgagagctatagtgcagaatacgcagtctttgagacgggtgcccggcacccatttgcccaggcagtgggcaggaatatagccaatcccacggccatgctgctgtcggcttccaacatgctgcggcatcttaatcttgagtatcactccagcatgatcgcagatgcggtgaagaaggtgatcaaagttggcaagatcccatctgctgttccctctttcctgctccatccactgcccttttcatgggccatctgaatgcagaacttgcagctctccttgggggtggaacagcaagggatacaggcaggctgaagcatcagcttcaccttcacgccccatctccttttcgctgtgattctttccttccacctggtcttgtctctatttcttccaaggaaggtagccacatcctgcctctgatctgcgtttcccatcatctttgcctgctcagcctcctgtcctgccctggctgcagcacagctaatagtggctt

SEQ ID NO: 58 - DNA, 1740 bp, Homo sapiens
ggggcccagctggtcgcggtccccccctcaacatggcggcagcggtgctctaggcgccggaagggggcgtgaatcggtgcgaccgcgcgcgtgcgcagtaccgggtccgcgcctgtccccgaaacttcgcaccccgtcgaactctcgcgagagcggtatctgcgtgtcgggacgtgcggaggctctcactttccgtcatggcgctgaaggtagcgaccgtcgccggcagcgccgcgaaggcggtgctcgggccagcccttctctgccgtccctgggaggttctaggcgcccacgaggtcccctcgaggaacatcttttcagaacaaacaattcctccgtccgctaagtatggcgggcggcacacggtgaccatgatcccaggggatggcatcgggccagagctcatgctgcatgtcaagtccgtcttcaggcacgcatgtgtaccagtggactttgaagaggtgcacgtgagttccaatgctgatgaagaggacattcgcaatgccatcatggccatccgccggaaccgcgtggccctgaagggcaacatcgaaaccaaccataacctgccaccgtcgcacaaatctcgaaacaacatccttcgcaccagcctggacctctatgccaacgtcatccactgtaagagccttccaggcgtggtgacccggcacaaggacatagacatcctcattgtccgggagaacacagagggcgagtacagcagcctggagcatgagagtgtggcgggagtggtggagagcctgaagatcatcaccaaggccaagtccctgcgcattgccgagtatgccttcaagctggcgcaggagagcgggcgcaagaaagtgacggccgtgcacaaggccaacatcatgaaactgggcgatgggcttttcctccagtgctgcagggaggtggcagcccgctaccctcagatcaccttcgagaacatgattgtggataacaccaccatgcagctggtgtcccggccccagcagtttgatgtcatggtgatgcccaatctctatggcaacatcgtcaacaatgtctgcgcgggactggtcgggggcccaggccttgtggctggggccaactatggccatgtgtacgcggtgtttgaaacagctacgaggaacaccggcaagagtatcgccaataagaacatcgccaaccccacggccaccctgctggccagctgcatgatgctggaccacctcaagctgcactcctatgccacctccatccgtaaggctgtcctggcatccatggacaatgagaatgtgaggttcccctcgcaccctaccctgctgccccgcccagtctccccctgcagcctcctgtagcccgcctcatgcactgaccacagcccccaggggaggatggtactggatctggccccatcttctggcccttagctggtgccacttccctcctgtggcaatcccagtcctgcacgtcacaggagacagcggggggtggcagggcctggtgtgtgccgagcctgcctgtgtcctacagatgcacactccggacatcgggggccagggcacaacatctgaagccatccaggacgtcatccgccacatccgcgtcatcaacggccgggccgtggaggcctaggctggccctaggaccttcttggtttgctccttggattccccttcccactccagcaccccagccagcctggtacgcagatcccagaataaagcaccttctccctagaaaaaaaaaaaaaaaaaa

SEQ ID NO: 59 - DNA, 188746 bp, Homo sapiens
cctgctgttgacctgaagacttagcaataacataaacagccgattaacaggcattttgtatgttacaagtattacatactgtatttctttctttcttactttattattattattattttgagatagagtcttactgcatcacctaggctggagtgcgctagtggcatgatcttggctcactgcaacctccgcctgttaggttcaagtaattctcatgcctcagccctccagagtagctggaattacaagcacaccacgcctggctaatttttgtatttttagtaaatatggggttttgtaatgttggccaggctggtctcgaactcctgacctcaagtgatccgcctccctctgtcttgcaaagtgctgggattacaggagtgaaccactgtgcccagcctctacacactacagtcttagaataaagcaagttagagaagagaaaatgttatttaaaaaatcacagctgggcatggtgtcatgtggctgtaatcccagctccctgggaggctgaggcaggaggatcacccgagatcaggaggtagaggctgcagtgagccctgatggtgccactgcactccagtctgggcagcagagtgaaaccctgtctccaaaaagaagaaaaaaagaaaaagaaaaagaaaatcacaaggaagagaaaatacatttacagttacagaacgctacaatatttatcaatgccataaatttgtttacaagatgaattgtctgtctgaagcagacaaccgcagctgtagagctccatttatgttacgtagcaagcaattcaactttttcttgtcctgtcctgacttttctctgcttctcgggagcatttccagcatcactagtggcactttacatgggtctcaggatgttattcaatgtttgcggtattgcactaaacacagtgaaaaatacgcgggaaccgccaagagatccctttttaccggggcacaaattcctggagaggtgaactgcccacagggagataattaatgtaacatggcatttaaagcggatacttgcaacacttgcactcactccagtagcaacaggaggtggctatgaaattgttacaataacacaatatattctatagttaattttatgcagttatgattgaatgctgcatctttacatttatttacatttctcttgacttggaataacaccatgtatggtttgtaagtgtgtgtgtacgttttaatacattttaactttttgtaacagatttgtgtatattttatgttagcaaattataaaatagggctggacatggtggcttatacctgtaatctcggcactgtgggaggtagaggcaggaggatcacttgagttcaggagttagagaccagcctgggcaacatggtgagacctcgtctctataaaaagtaaaaaaattagccgggcgtgttggtgcttgccaggaagatcgcttgaacccaggagttggaggttacagtgagccatgattgggccactgctctccagcctgggcaacagagcaagaccctgtctctaaaagaaaataataacaaaaataataaaacagactagtatctacatatattttatgcattcatgacatacctaatttttttttaatatttcttggctaccaagttcatctgcaagtcttttcaaactattgcaaatctctaaaaatgtttccaatatatttattgaaaaacattctgtttaaagatgacctcactttgggaggctgatcagatcagctgaggtcaggagttcgataccagcctggccaacatggtaaaatcccgtctgtactaaaaatacaaaaattaaccgggtgaggtggcgtgtgcctgtagtcccagatacttgggaagctgaggcaggagaatagcttgaaccctggaggtggagattgcagtgagctgagattgctccactgcactccagccagggtgacagagcgagactctgcctcaaaaaaaaaaaaaaaaaagatgtgcacggttcaaactcatgttcaagggcccactgcagttctcacccatggcttcactttctcctctttcttttctgcagctacagtgaatgcctggttcagttgcaagaatgccttgcccactctcctctgggcctttgctcatgccttcccccacctgaaacacatccctatggcttccctaggatggctcctcttcattttcagacttaagctcaaaatcacatcctcagtcaggtgcagtggctcacgcgtctgtaatcccagcaattagggagaccgagacaggcagatctcttgaggtcaggagttcaagaccagcctgtccaatatggtgaaaccctgcctctactaaaaatacaaaaattaggcaggcgtggtggcatgcacctgtaatcccagctactctggaggctgaggcaggagaattgcttgaacctgggaggcggaggttgcagtgagccaagatcgtgccactgcactccagcctgggcaacagagtaagatccatcaaaaaacaaacaaacaaaaaaccccatgtcctcagcaaacccctccctatgcacctcccatttccctcagctcattacacactcaattattttaagggctctctccctggctcagttgtgaactccataaggaaatgggtcatgtttattttgctcactgaaaaatcccctattacttattgcttgttgattctcccactcaacaaatatttattaagcaacagatttgtcaggcactgggtttaagcagtgaaacaagaccgaaaagatttccgccttcacgggaaggggagaagacacagaaaacgaataagaatttcaaggccaatcatggtggcgcatgcctgtaatcctagcaccttgggaggccaaggcaggaggattgcttgaggccaggagttcaaggctgcagtaagctaggattgcaccactgcattcctgcctgggtgacagcaagattctgtcaaaaggaaaaaaaaagaaagaaaagaaaaaaaaaaaacaaacaattgcaggtagtggggtaaacatgctatgaaaatgagagagaaggggccaggcgcagtggctcaggcctgtaatcccagcactttgggaggccaaggccggtggatcacctgaggtcaggagtttgagaccggccaggccaacatggtgaaatcctgtctctactaaaaatacagaaaattagctgggtgtgctggcgcatgcctgtaatccaagttacttgggaggttgaggcaggagaatcacttgaacccaggcaggtgatgttgcagtgaactgagatctggccattgcactccagcctgggcaacagagaaaaactccatctaaaaaaaaaaaaaaaaaaaaaaaaaaaaaaaaaaaaaaaaaaacagagagagagagagagagaaggaaacggaactggggggaggatttgcaaaaatatggttagggatggcacttcagagatgaagccatcctggagtgttacgggcaagggaaatgctggggcaaaggcccagaggcaggaataggtttggcctgttgcatgaacagtgggtccagctcctagcaaactgtttattgaatgaaagaagaatgaatgccttgggtctagggttgtgctgggcgctttcttaagttttctttcccgggtacctccccagaactggcatgcaggtattattaaacccattacacaagtgaaactggcccagagacagaaaagtccctggtccaagaccacacaggagtgaggggtggaggaaccctcctcccattgagttctggctttcctatactgaaagccccttcctctcctgcagtaaggtaggtggaaccgctgtcccgccttgttggtgaatgtcgttgctagacttcagacacatacaggctggtctgctgaaaatcagagatgtccacctgcgccctattcgaggtctccggcgtcttctttggcgtcgtctttgccctttcagaagcgtctgcacatttttccaggtgtcatttctccaacttgaacacagggagcgcactgggcacgcgggcacgtggctgtccccaggggcctggcttgggtctcgcccctgggccggggcgcactcgcgggcgggacatctgggggcgcccacgcgctctgggacgagtgtcgctggccaggcccggactgaggaaaggcgagtgagacactactcgcctggggtgcaaaatttaagggagtgaaaaaaaaaaaaaaagaaagaaaccaaaaccacctcgagtcaccaaaataaacattttaatgcagtattttttaaaaaatcaacaggaatcctccaaagcccactatgaacaaaatagcaaaatggtagagaaaggatctgtgccgctgcgtcgggcctgtggggcgcctccgggggtctgaaactggaggagactcggggctgtagggcgcgcggatctggggcgcgccctcggtcccggcgcgcccagggcctcccgcgcggggcccggcacagggaggcggggaggcgggcggggcggggcggggccgggcggcacctccctcccctgcaagctttccctccctctcctgggcctctcccgggcgcagagtcccttcctaggccagatccgcgccgccttttcccgcggcccgcacggggcccagctgacgggccgcgttgtttacgggcccgagcagccctctctcccgccgcccgcccgccacccgccagcccaggtgcccgcccgccagtcagctagtccgtcggtccgcgcgtccctctgtcccggagcccgcagatcgcgacccagagcgcgcggggccgagagccgagagacagtcccgggcgcagcgcggagctccgggccccgagatcctgggacggggcccgggccgcagcggccggggggtcggggccaccaccgcaagggcctccgctcagtatttgtagctggcgaagccgcgcgcgcccttcccggggctgcctctgggccctccccggcaggggggctgcggcccgcgggtcgcgggcgtggaagagaaggacgcgcggcccccagcgcctcttgggtggccgcctcggagcatgacccccgcgggccagcgccgcgcgctctgatccgaggagaccccgcgctcccgcagccatggccaccgggggccggcggggggcggcggccgcgccgctgctggtggcggtggccgcgctgctactgggcgccgcgggccacctgtaccccggagagggtgagtctgggggcgcgggcgtgggcggggagcgccgcgatggggagaggaccccacccaagccaaaatcgagcccccgcttgtggactgagaaccctccccaggggcggggggcggtggccaggacggtagctcctgcatcgcgtagggggagcgggaagcctctgaccttggcctttgcccgcccgggctcgcgcctccgcgccctgcgtgcccgacctgagcccgaggaaccttgccccggtgcccgccccgccgcgggctcctctctggagcgcgcctccgacccgtgccccggcccctccgagcccaagtcgctccggagacacgacacgcgtcatctttgggtcgcggccgggaagtggggtcactgggtctggacagccccgaacagccaagtcccccgagcgcatatggtgtaggtagagccaagcgccctgagtgcctcaccggtgggtgacgctgcctggggtcagggactgcagagcccccctctacccaactaccttggatctaggcccgtggccaccccggactctaggtccatgtttacccttttgggttctgtttccagatgtccggaggcaaattctaaagccttagcaacagcagcaattgtagcagaagtagtggcggttttttaccctatttattgtaattggtatcaccgcacgccacagcctagtctatcttatctctctggactgtcacagtggcccccggaggcagatacagttatgcacccatttcacagaggagtaaactgaggctcatgtaggacgcataactcccttgccctaaagtcagtgccagagccaggacttgagcctctgtgtgtcccgttctgcccaagaatctggactactgtcccttgtctgctgtctccttgacccctcctctcccctcagccctgcgcttcatgaaggagcctttgaccttgagtgagcctttcgttccccctgaccccatgggcccctctcccacgtgtgggcagcatcttccttgggcttgacaataggcacctttggggttgtaagatgaagatggcgcaatcatttaaggaatatagcctgggtttcccactgtggggtctgaggccctgctttaaaaatatctgttgggttactgtttcagatttctccataaaaggaaatcagtcgtgatgaggaaggggtcagggagggaaggaattgaagctcttaaatgtattgatggggaaacgggtgcatgtaaaatcaggtgctagagtggaccaaccgggtttgctgagtcgactctgtcaatcacataatgtctaaaagccccgggcccacccccccccagccccgcccccaggtgcctgggagacagtaggtgctcaatgaagggtggcggttagttggagttcttgttaagaaaatctggccagctgcggtggctcaagcctgtaatctcagcattttgggaggctgaggcgggcggatcacgaggtcaggagatggagaccatcctggccaacatggtgaaactcccttctctgctcaaaatacaaaaattacctgggtttggtggcgttcgcctgtagtcccagctacttgggaggctgaggcgggacaattgcttgaacccgggaggaggaggttgctgtgagctcagatggcaccactgcactccagcctggccaaagagcgagactttgtctcaaaaaaataaaaaaaaaggcggggcgtggtggctcacgcttgtaatcccagcactttgggaggccgaggcgggtggatcaccagttcaggagatcacgaccatcctggctaacacggtaaaaccctgtctctactgaaaaatagaaaaaattagccgggcgtggtggcgggcgcctgtagtcccagctattccggaggctgaggcaggagaatggcgtaaacccgggaggcggagcttgcagtgagccaagatcgtgccactgggcgacagagcgagactctgtctcaaaaataaataaataaataaaaagaaaatccaagatgagtggtttcgaactatgccagattctatgtgtgcgtgtgtgtggttccctgttcttctgttccttgtagctttggtaattaattgtggatctgtgcctgggctttcagggtcagtaaatggatttaccatttctttgcacatttatggcttccatatgggcaggggtttatggtttgttgttgttcaccgttgcatttctagagcccagaacgatgcctggcacatagtaggtgttcagtaaatatttgttctgcagtggggcacaagtggtggagttcctgggtgtactgggctcctttatcatcttaaggagttccttattctctgcataataccttcctaagaattagaagagcaagctctcagcaggtgctgttctatgcgctttgcatatataatctcagttaatcctcacggcaaaaccccacgaggtgcggtttaatcttcccttttcacaagtgagaaaacttcgcttgaggccagcaggcagcagggctgggattgcaatctagctagtgtggctgcagagcaatggtttcttaacaaatctttgttcttttgagtccgagcctccgtaccccccacgattggggtgatggtgaacaaaatcctgtcaaataaatgggctgtgatgcctcttgaaggcttggggaggggcaaagaacttttcagatcattaatctctaatgtcaaccaatatggcttttttttttttgagacggagtcttgctctgtcacccaggctggagtgcagtggcacgatctcagctcactgcaacctccacctcccaggttcaagggattctcctgcctcagcctccccagtagctgggattacaggcgtgttccacaacaccggcttattttttgtatttttagtagagacagggctttgctgtgttagccaggatggtctcgacctcctgatcttgtgatccacccgcctcggcctcccaaagtgttgggattacaggagtgagccaccgtacctggcctttttttttttcttttttttttttgagacagggtgtcactctgtcacccgggctggagtgcagtgacacgatctttgcgacctccgcctttcaggttcaagtgcatctcctgcctcagcctcctgagtagctgggattacagtcgtgtatcaccacccttggctaatttttgtatttttagtagagatgggatttcgccatattggttaggctggtctcaaacttctgacctcaagtgatctgcctgcctcggccttccaaagacctgggattataggtgtgagccatcactccgggcccaatatggcattttgattgggatgaagggtggaggaaaatcagtgtgatttttgtatctatctctctagctatctattattttttgagatgaggtcttgctctgttgcttaggctggagtgcagttgggcaatgatggctcactgcagcctcgacctcctggacgcaagccatcctcctattttagcctccgtagtagctgggaccacaggcacacgccaccctgcctggctaatttttactttaatgtgtagagctgaagtcttgctattttgtccaggctggtctcaaactcctggcctcaagcgatctgcctgccttggcctcccgaagtgctgggatcacaggcatgagccacggtgtctggcctctgcagttattcttattctttgcttctctcctggagacctgcttcttgcccttccccattcatgcatagagaccacagggtgtgggctgagtccccagggctccccacctcaccccactctacccttgacttccattcctctttggtttaagcagaactctcaatcttggcactgctgacatttggggctggatcattcctggtggtgggggctgtcctgtatgtagagtgttgagctggaaccatggtctccacccatgtggtcctgggaggatccccttccccccaggcatgacaaccactaatgtctccagacattgccaggcacgtctctgcaggagttaaccttttccctgtctgagacatttacccatctgggctcttgctctttctcctctctttgttcaataatcctcggccgggtgcagtggctcacgcctgtaatcccaacaccttgggaggctgaggtgggcggatcccctgaggtcaggagtttgagaccaccctggccaacatggtgaaaccccatctctactaaaaatgcaaaaattagccaggtgtggtggcgggtccttgtaatcctagctacttgggaggctgaggcaggagaatcgcttgaacctgggaggcagagcttgcagtgagccgagatcacaccattgcattctagcctgggcaacagagagagactctgtctcaaaaaaaaaaaaaaaaaagaaaagaaaaaagaatcttcatttacccacgtgctttttcagcctctaaacacccagtaccccccaatccccattacctaccactgacctccagcctccaccctgtccagcttccccaggccagtcctccctgccctttccatctcactcttttctcactgttctgcccccagcatctggcttgcatctccgctgctttaccgatggctctcgaagttaatctctcatctcccagttgcgtctcctgcagcctcacctcacttgacccctctgggtttgacattgccagtcccccctcctggaaggctgtgtctcccgtctcacctgtgcctaagttcttctgttttactgttctcttctccttctacctgggctaagatgttggctctctcttcccagagggtcagtgtttcctttaatcttctctcagctcacttttttttttttttttttttcacttcttcacccgggctggtgtgcaatggcatgatcttggctcactacaacctccgtctcctgggttcaagcaatggtcctgcctcagcctctccagtagctggaattacaggcatgtgccaccccgcctggctagtttttgtacttttagtagagacagagtttcaccccattggccaggctggtcccaaactcctgacctcaagagatccacctacctcagcctcccagagtgctgggattacgggcatgagccaccgtgtccggccctttttttttttttttttttttccaatttttatttctttttagagacaggattttgctctgtcacccaggctggagtgcagaggtttagtcctagcttactgcagcctccaagtcatggcctggagcagtcctcccacctaggttccccaagtagctggaatcacaggcaggtgccaccatgcccagctaattgaaaaatttgtttgtagagacagagtctcactatgttgcccaggctggtcttgatttcctggcctcaagtgagcctcctgccttggccttctgagaaactaggatcacaggcaggcaccaccatgactagctaatttttaaaatttatttgtagagacagagtctagctatgttgcccatgctggtcttgaattcctggcctcaagcaacctgcttgcctccgcctcctgggtacctgggctcacagacagtcaccaccatgcctggctaattaaaactttttttttttttttgtagaaacagggtcttgctatgttgcctaggctggtcttgaactcctagttcaagcagtcttccctcctgggcctcccaagtgctgggattataggcatgaggaaccattgcgcccagctaagaaatttacatagattccgacttcttcatctgaacaggggtcagcaaactatggccctcaggccaaatcccacggtttttgtaaatgcagttttattggcatgcaaccacactcatttgtctactcatcatctatgactgcgcaaaaatgccccgacacggcaggttgagtagttaaaacaggaattccatggccaaaatatttacactttggccctttacagaacagcgtttgctgacctctgatctggaacagacgccttgaggtttcattcatgatagcatgcctaatagcttgtgcagtccctggtacaactcgaatgaagtgagtgaaatgaaacgctatgtctttctctttacaccgcaagagatgttaaagaaacgtgtgtcatttgctgcactgaatatacggattccaaggatgagaaaaatcaccgtgatgttgcctacttagccatgtgtatttatttaaacagctatattggcattgaatgaggatttcatgctctcaaccctgtatctagaacccaaaatataactggtgtatataatgagattttttttttttctctcaggcctctcttgtgttaatttctgttaagaatacttctgggccaggtgtggtggctcacgcctgtaatcccaagcactttgggaggccgaggtgggtggatcacttgaggtcaggagttcgagaccagcctgaccaacatggtgaaaccccatctttactgaaaaaatacaaaattagccaggcgtggtggcgcatgcctgtaatcccagctagttgggaggctgaggcaggagaatcgcttgaacctgggaggtggaggttgcagtgagccgagattgcgccactgcactctagcctgggtgacagagcgaaactccatctcaaaaaaaaaaaaaaaaaagaatatttttggccaggtgcagtggctcatgcctgcaatcccagcactctgggaggctgaggtgggaggattacatgtgtccaggagtttcagatcagcctggacaacacagcaagaccctgtctccactaacaataaaacaaaaattagctgggcatggtggcatgtgtctgtagtcccagctacttgggaggctgagatgggaggacctcttgaggctggaagggcaaggctgcagtgagctgtgattgtaccactgcactccagcctgggcaacagtgagatcctctctctgtctcaaacaaaaaaagaatacttcttggggtggcctggttgatattttgcagctgcatggtatttacagtttttaattaaatagtgacgggtaatgcattctcattgcaaaaagaaaaattacaaaagtgtagaaaggaaaaaaaaaacacagaagtccttctgcaaaatcttgtggtggggtgcagtggctcacacctgtaatccctggactttttaggaagctgaggtgggaggaacacttgaagccagcagtttgagaccagcctgggcaacataatgagacattatctctagaaaaagtttaaaaattagctgagcatggtggtgtgtaccggtagtcccagctactcaggaggctgaggtgggaggatcgcttgagcccagaaggttgaggctacagtaagccatattcatgccactgcactccaacctgggtgatagagcccgaccctgtctcaaaaagaaaagaaataataaaaaaaaatcttgtccccctgtccccaaaagcattccattcatgtccagggaggtaactgtgccattggtttatgtatctttttgatgtttagtaattttttaggctaggtgtcatggggccactcctgtaatcccagcactttgggaggccgaagcaggtggatctcttgagcccaggagttcaagaccagcctgggtaacatagcaagaccccgtctctacaaaaccctacaaaaaaattatccagatacagtggtgagcacctgtggtcccagctactagggaggctgaggtgggaggatcacctgagcctgggaagtcgaggcgccagtgagctgtgattgcaccactgcatccagcctgggtgacatagtgagactgtgtaacaacaacaacaacaaaatattttaaacattatcatacagtaaaattggctttttaaaggtgtaccattttatgatttttaagccatgtgtagagttgtatggctattgccacaattaggatagagaacagtctcgttgttgtccaaactccctcaattcacccctttatcactaaaccacctccacccctaaccacagatctgttctccatccctatagttttctctagactttaaaagattttatcttataattggattaatattcctaaagttgaaattttaaatttgagtctggttgatcctcatcattcccagatcccatattttctttttaaaatttaaaatttaaatttttattttgagaggcaggttcttgctctgatacccaggctggagtgcagtggtgtggtcctaattccctgcagcctccaactcttgagcatcaacgatcctcctgcctcagcctcctgagtagctgggactacaggcacacaccaccatgctcagctagtttttattgttatttatttatttatttatttttgagacggagtctcactaactctgttgcccaggccagactgcagtggtgtgatctgggttcactgcaacctctgcttcctgggctcaagcaactctcctgcctcagcctttctagtagctggggttacaggcacgccaccatgcccggctagttttttttatttttagtagagatggggttttaccatgttggtcaggctggtctcaaactcctggcttcaagtgatccgcccacttcagcctcccaaagtgctgggattacaggcgcgagccactgtgcccggcctaatttttaacttttcagcagggataagggctcgctatgttgcccaggctggtctcgaactcctggcctcaagtgatcctcccatcttgacttcctaaagtactgggattacaggcatgagccactgcacctggccccagaccctgtatttttgaattcacctactcactcaaatgtatttgtaaccctcaaaccagcatgctcagtgcctttctggtcattttaggacactcataagtacgagtctcaaatgtgaggtcaagtaagagggcattccaccttcttgcttcagcccttatgcgtcagattcatacaatctgcacactgaggattaaaactagtcctttttgagcaggcgcagtggctcatgcccagcgctttgggagtccgaggcgagtggatcacgaggtcaggagatcgagaccatcctggctaacatggtgaaaccctgtctctactaaaaatacaaaaaattagccaggtgtggtggcgggcgcctgtagtccgagctactccggaggctgaggcaggagaatcacttggacccaggaggtggaggttgcagtgagccgagattgtgcctctgcactccagcctgggtgacagggtgagactcaaaacaaaaaacaacaacaaaaaaacctgagtcctttttgtggttatttggtgccacatttttagcatttttgtgctttcagttggtgatggggctgtttcaaatgccccccagggtgctgaagccctgctctctactcttccttggctaaggagggctgtcaccacccttgtggagaaaaggcagcgtggcggggcacggtggctcacatctgcaatcccagcactttgggaggttgaggcaggtggatcacttgaggccagagtttgagaccagcctgggcaacatggtgaaaccccatctctactaaaaatacaaaaattagctgggcgtgatggcgcacacctgtaatctcagctacctgggaggctaaggcacaagaattgctcgagcctaggaggtgaaggttgcagtgagccaaggcggtgccactgcactccagcctgggcaacagagtgagaccctgtctcaaaaaaaacccaaaaaaacaaaaaaactccaaaaccaacacacacacacaaaggcatgtgttacataaactttgttcaggcatgagttctattactgttggccgtgagttcggtgttaatgaatcaacaatatagattcaatagtgtctttcaacagaaacacacataaaacaaggctaggtattgatccatggataaatgtgttgtggccagaagttcgcaggtacttaccctcgcattttcctaggaacaatggttcagtattcactagttcaacattcaggggaatttcacagagccaaactaccaccaataacaagaatcggctgcaagtggtttaaaactggtgaatctgtggctcatacccgtaatcccagcactttgggaggccgaggcaggtggatcacctgaggtggtgagttcgagaccagcctggccaaaatggtgaaaccccgtctctactaaaaatacaaaaattagccgagcacggtggctcatgcctgtagtcccagctactcaggaggctgaggcgggagaattgctggaacccgggaggcagaggttgcagtgagccgagactgcaccactgcattccagccagggcaacagagcaagaccccatctaaaaaaaccaaaccaaaccaaacaaaactgtgggtttgtcattttccgtttagaatcctttgaatgcaaatgccctttttgttgtattttcatctgcgtggaaaccgctgggttgataccttttggaaagttcatgagatgtccaaaaacccctggcccatgtttcagggaggggaatccctgccctctgccaacactggtggcagggagaggcagcagtggctctcgggattttatttatttcatttattcatttacatttttttgagaaagggtcttgcactgttgctcaggctggagtgcagtggcgcaatcacagctcactgcagcctcgacctcctgggctcaagtggtcctcccacctcagcctcctgagtagctggcactacaggcgtgtgctaccacgactagctaatttttgtattttagtagagatggggtctcaccatgttgcctattattattattattattattactttttttgaggcggagtctcactctgtcgcccaggctggagtgcagtggcgtgatctcagcttactgcaagcttcgccttccgggttcatgccattctcctgcctcagcctcctgagtagcagggactacaggcgcccgccactgcccccggctaattttttgtatttttagtagagacggggtttcaccgtggtctcgatctcctgacctcgtgatcccccacctcggcctcccaaagtgctgggattacaggcgtgagccactgcgcctggccatgttgcctattattattattattttgagcagtcttactccgttgcccaggctggaatgcagtgtcacgatctcagctcactgcaacctccgcctccagggtttaagcaattctcctgcctcagcctcctgagtagctgggactacaggcatgtgccaccacgcccagctaatttttgcattttagtagagatggggtttccccatgttgcccaggtgggtctcaaactcctgacctcaagccacccacctgcctcagcctctcaaagggctgggattactggtgtgagccaccttgtccagctggcttgaaggattattattattattactattattttgagatggagtcgcactctgttgcccaggctggagtgtagtggcacgatctcggctcactgcaacctctgcctcctgggttcaagcaattctcctgcctcagcctcccgagtagctgggattacaggcgtacaccaccacgcccagctaatttttgtatttttagtagagacagggtttcaccatgttggccaggctggtcttgaacccctgacctcaaatgatccacccacctcggcctcccaaagtgctgggattactggtgtgagccaccgtgccccgccggctcgcggggttttagaaacatattttgtttccagcagaacaagctttgctatcctgcggtgccacgtacagactggctctaagctcctgttggagttcaaagcggacttgtgggaatgaatgtttaatttcacatctggcattttcttccagttccttagaagtaggatatctcatcaggtttatataaaagcccctgatgtatgttcaggaaaggcaggatgctatcatgagattcttatttcctttgcctttgtgggaatgtggaaaccataggtactgtctaaaaattaccctttttatcaatgcaggcaaaagtagtcagacaggaagggactcgagagtagggatgcaactgcttttttaaattgattttaaaatctcatttattcttatcattagagacagggtcttgctctgtcatcccggctggagtgcggtggtgtgattatggctcattgcagccctgaactcctgggctcaaatgattctcgcgcttcctcctcccaagtagctgggactacaggcatgcaccaccatgcctggctagtttttttatttttattttttgcagagacagggtctggctgtgttgcccaggctggcctcgaactcaagaccttaagtgatcgtcccgcctcagcctcccaaagcactgggattgcagatgtgagccactgtgcctggtgggatacaactgttttctgactgcctgtgtatgtgtctgtgtgtgtgtgtgtgtgtttgtttgttgttgtcattctactctcaaggatgtatcttgttgtttccttgcagaagatcagaaaagggaggacctcatatgttccctcctaattatacccagttacacggtctccataccacctgttacaaagtgactttctggtctggcaggacttctcttgtttttcctcctgtcttctgtgtcctgtctgctcttgtctgtataaatttcaggactcctgaaatagcacggaagcccccttctaatcctgtggtttgatgtttgatattgttaggattacaaaactatgtcatagactagaggagtcagacattccagagttcacagaaggtgttggtgtccgggtggctgtgggacacaggtgcccttcctagtccctggcctttcatactgtgccccctggagcccctctttctttcttttttctttttttttggagatcgagtctcgctctgtcacccaggctggagtgcagtgcagtggcacgatcttggctgattgcaacctctgccttccaggttcaagcgattctcctgcctcagcctcctgagtagctgggattataagtgtgcaccacaatacctgactaatttttgggttttttgtttttttttttgagatggagtttcgctcttgttgcccaggctggagtgcaatggcatgatatcggctcatcacaacctccgcctcccgggttcaggcgattctcctgcctcagcctcccaagtagctgggactacaggcatacgccaccatgcccagctaattttgtattcttagtagagatggggtttctccatgttggttaggctggtctcgaactcctgatctcaggtgatccacccgcctcggctgcccaaagtgctgggattacaggtgtgagctaccatgcccggcctggctaattttttatatttttggtagagacgggtctcaaactttggccaggctgggctcgaactcctgacctcaagtgatccacctgccttggcctcccaaagtgctggaattacaggcgtgagcaaccgcacccagcctttgttttgttttgtttttttgttttttgttatgagacggagtctcgctctgttgcccaggctggagtgcagtggcgcagtctcgactcactgcaagctccgcctcccgggttcacgccattctcctgcctcagcctcccgagtagctgggactacaggcgcctgccaccacgcccggctaatttttgtatttttagtagagacggagtttcaccttgttagccaggatggtctcaatctcttgacctcgtgatccgcccgcctcggcctcccaaagtgctgggattacaggtgtgagccaccgtgcctggccttgttttgtttttgagacagggtctcctcgcactgtcgcctaggctggagtgtagtggtgtgatgtcaggcctccgcaatctccacctcccaggctcgagcaatcctcaacctcccgagtagctgggactacaggtgcacaccaccacacccatccaatttttttttttttggtagagatggggttttgctatgttacccaggccaatctcaaactcctgggctcaagcagtccacccacctcagcctcacaaagtgctgggattccaggcgtgagcctctctttctatcattttcttctctcagttgtctccgtgctacctttcctgcaatatcacctgttgtcactgcgtccaccagcatccgtacctgttcccccatcttcccaatgcccacgggacccacatccctgagtatcccaaagccctcacagactcaatatgctgccaactcagcctgttgttcttgccactctaaactgttcctatctcgaatgcttcaggctcattgacgatccctcctcactctcttctccctcttctcttccatttctcctgggtatgaagtcctgttcacacaaactgcccctggtttctgtggtgctatgcatgctgtcttcagtaccttcttcattctgctgccagaaggctgtttctctctttcttttttattttttaattttatttttatagacatggggtcttactgtgttgcccagattggtctcagacttctggacttaagtgatcctcctgcgtcagcctccccaagggctgggattatagatgtgagccactgtgccctgtctagagggatatttattttattttattttattttatttcttttctttttttgagatggagtgtcactctgtcacccaggctagagtgcagtggcgtgatctcagctcactcaacctctccctcctgggtttaagagattgtcctgcttcagcttcctgagtagctgggattacaggtgtgcaccaccatccctggctaatttttgtatttttagtagagatgaggtttccccatgttggccaggctggtcttgaactcctgacctcaggtgatcctcccacctcaggctcccaaagtgctgcgattacaggcatacgccaccataccggactcatttttgtatttttagtagacatggggtttcactttgttggccaggctggtctcaaactcctgacctcaggtgatcctcccacctcagcctcccaaagtgctgggattacaggcacacgccaccacaccaggctaattttcatatttttagtagacatggggtttcaccatgttggccaggctggtctcaaactcctgacctcaggtgatccaccccccttgacctcccaaagtgctgggattacaggcgtgagccactgtgcccagcctgtgtggctctcttttggttaccctgtggtatcctgttttctcaagctcatcctccctggtgggtccatgatccctggaaattgttggtcttctccggccttttgaaattgctgccttatgaatgtccagagttgggtatctgcctttctctcccaaggaggaagaatcctgagggggcatctttgcttttaggtcccagggctttcactgacttcctccttgctggcttcttggtttgttccaaagatgtcctcggtacatcttctgagactaatgacatgataagtttctggaaggactatgatctggatgatgagggtttcatcacagtcctctttcagttctgtcctacagattacacttgttttcttccttcatcctttgtcttcactggttcactgtttccatctgcattcttctgttctcatttctttttgttgttgttttattttttattttttaatttattttttaatttttttgagaccgagtctcactctgtcacccaggctggagtgtagtggcacagtcttggctcaatgcaacctctgcctcccaggttcaagtgtttctcctgcctcagcctcctgagtagctgggattacaggcgagcgctaccgtgcccggctaatttttttgtatttttagtagagacggggtttcaccatgttggcctggctggtctcgaactcctgacctcaagtgatctgcccgcctgggcctcctgaagtgctgggattacaggcgtgagccaccgtgtccggccttggttttttttagaaatagtgtctcactctgtcacccaggctggagtgcagtggtgcagtcatagctcactgcagcctcaacctcttgggctcaagcaattctcctgcctaagcctcctgagtagccgggagcacagacgcgcctcaccacgcctggctatgttttgtatttttagtagaggtagggttttgccagttgcccaggctggtcttgaactcccggactcaagcagtccacccgcctatgcctcccaatatgttgggattacaggcatgaccactgcacccggccaacatctctgcagttctttgttttagtactttgtcctttagctctggtggtagcttatcacagttatttaggtgcgtctttcctttacttgctgtaagagtgcaaccttatttgtcttgagagtccccctgggcctggcacaatgtctggcccaccgagatgcccagcaaacgtttgctgagtgaatacaggaatgatttccatgtagctgacttgccgggtccagaacctgcatttgatccagacgcctccattccttctcgcagaggtagatttgaaagctattcttgcaggcaggtggagaatcttaaggatctctgacaccccagtgtgtccaagctctaatttctggaggtaataaatctgggaatggattccatctggctcagatgggagacagaacaggtatacacagccagagaccccagttctcatctcttctttgtaggtttcattatgctgttgtcatcatttaaaggaaactgaggccaggcacggtggctcacacctgtaatcccagcactttgggaggtctagacgggtggatcacctgaggtcacgagtttgagactagcctggccaacttggcaaaaccctgtctctactaaaaatacaaaaattagctgtgcgtggtggcgggcgcctgtaatctcagctactcaaaaggctgaggcaggagaatcgcttgaacccgggagatggaggttgcagtgattcgagatcacgctactgcactccagcctgggagacagagtgagactccgtctcaaaaataaaaataaataaatgaataaataaataaaaaggaaactaaggcgtgcagaggggttgaagatgttgtccaggatcacacagttgacaggtgacagagctgggttgggaagccagattcgttagatttctagtgtgccccaaaactggtataggtggtggcctgacaccagaacccaagacttgttgaggcaggacctcctgaatttaagaggaagcagtttgaggactggaaagaatgtggaaagggacgtgtgggccccagaataggtcagcagggagcattttaagaatgctgttactggccgggcttgatggctcacacccatactcccagcacactgggaggccgacgcaggactgcttgagcccaggatattgagaccagcctgggcaacatggtgaaaccccatctctacaaaaaatacaaaaattagccaggcatggtggtacgcagctgtagtcccagctacttgggaggctgaggcaggaggatcacttgagcccaggaatttgaggctgcagtgagctatgattgcaccactgcactccagcctgggcaacatagcaagactctgtctcaaaaaaaaaatcctgtaactgaagaacaaggacctttatgattgaaaacaggaagtagaaaactcttagcattgtaaaggatttcagaatcttctagaaagttctttctctgccctgctcccaacccatctcccctgctgttttcatgatggagagaaaatcagggaagaaaggaacacttcctaagatggctctcatgtccgccttctctccttctggaaaattctcagattcaggaccagcacggtccaatacagctctgctttgatggaaatactctgtatctgctctgtccaatatggcagccaccatccacgggtggctcttgagccctggaagttgtggctggtaagactgaattctttttttttttttttgagatggagtctcgctctgtcatccaggctggagtgtaatggcacaatctcggctcactgcaacctctgcctcccaggttcaagcgattctcctgcctcagcctccctagtagctgggattacaggcatgcgccactcccccgaccccgctaagttttgtatttttagtagagacggggtttcaccatgttatccaggctgatctcaaactcctgaccttgggtcatccacccgccttggcctcccaaagtgctgggattacaggcgtgagccaccgcacctggctgaaactgaattttattttcactttaattcattgaaatgtcaatgtaaacttttatttaattcatggaaatgtaaaaaaaattagtactcagttctgttactggaaaactctcccatatatttggaacaacttggttatgtgaacttgaggtagtaggcgggactcgtctccagaggcggggatccagccctggaccaaatggaggactagccacaaggacagggctggccgggcgcagtggctcacgcctgtaatcccagcactttgggaggccaaggcaggtggatcacctgaggtcaggagttcgagaccagcctggccaacatggtgaaaccttgtctctactaaaaatacaaaattatctggatgtggtagtgcatgcctgtaataccaactactcgggaggctgaggcaggagaatcacttgaacccaggcggcagaggttgcagtgagccgagatcatgtcattgcattccagcctgggcaacagagtgaaactccctctctgaccaaaaaaaaaaaaagtgctgtctaacaccaccagctcaccctcgaattctttcctgggtgaagccaaaaaccctcccggggtaaggctcaattttggggcttgcctcttctacatcaaacctacattttcgatgatactctttataaaatctacatagacaaatcaattttttttttttttttttgagacacagtctcactctgttgcccaggctggagtgcagtggcctgatcttggctcactgcaagctccgcctcctgggttcacgccattctcctgcctcagcctcccgagtgtagctgggactacaggcacctgccaccatgcccagctattttttttttgtatttttagtagagacggggtttcacatggttagccaggatggtcttgatctcctgacctcgtgatccacccgactcggcctcccaaagtgctgggattacaggcgtgagccaccacgcctgggcgacaaatcaattatttttaaagaaaaatgagcctccgtttcgagatgggctgccagggtaaagcacacaccacatctcgtaggcgtcatgggaaaaaaatcctgcagaccagggatccccaacccttaggccacagaccagtagcagtccatgtcctgttaggagctgggctgcacagtagaggtgagcagagggcaggtgagcattgccgcctgagctccgcctcgtgtcagaacaatggcagcattagattctgataggagctcgaatcctgtcgtgaactgtgcatacaagggatctaggttgcctgctccttatgagaatctaactgatgcctgaggatctgaggtggaacagtttcattctaaaaccatcaccacccatcccgtgttcgtggaaaaattgtcttctaccattggtccctggtgccaaaaaggttggggaccactgctgtggactatctcattaatcattttttttttaggattgattatatgtgggaattatttatttatttatttattttgagatggagtcttgctttgttacttaggctggagtgcgacgggatgatctcagttcactgcaacttccatctcctgggttcaagcgattctcctgcctcagcctcctgagtagctgggattacaggtgtgagccatggtacctggcccattcggcatattttagtacggagatggtggtcaggcacggtggctcacgcctgtaatcccagcactttgggaggccgaggtgggcggatcacctgaggtcagagttcgagaccagcctggccaacatgatgaaatcccatctctactaaaaatacaaaattagccaggtgtggtggcacacgcctgtaatcccagctactcgggaggctgaggcaggagaattgcttgaaccccagaagtggagtttgcagcaagccaagatcatgccactgcactccagcctgggcaacagagtaagactcaagtctcaattaaagaaaaaaaaaaaaagaaaaaagaaaatattagctgtcacttagcaccctcttcctcattgcctttttctacctgtacaaagagtggccattaaccaggtacccattatgaagaacttgaagcatccttcacgcccactcagagatgttaaaagccagcagaagtcctcgtgtctatttctgccttcatttctaacatcctctgggtattttctgtcccagtggtaaactgctctattgtctttcactaatagggacacatacggctttaatgaattaagagttagattcataggatatttaaaaagaaaagcaattcttgattgttccctacaattatagctgtttaatctttactcataacaactttagtgagacagaattcacatgacatacaattcacccattttaagtgtgcagttaggtggttttgaggacatttacagttgtgcaactgtgaccacagtcagttttagaatatttgcatcatcttcaaagaaaccctgtaccctctagctactactttccatcccccatttccctagctcttggcagccacgaatctattttctgtctctatggatttgcctctttcggatttttttgtatgaatggagtcagacaacatgtggccttctctgtttgacttcttttatggagaaggttcatacctgtaatcccagcactttgggaggccaagactggaggattgcttgagttcaggagtttgagagcatcctgggcaacatagagagaccactatctctacaaaacaaatttaaattagctgggcatggtggtgcatgtctgtggttccagctatactggaggcataattttgttttgtttttgtttgtttgtttgtttttgtttttgtttcgtggggtttttttggttttgttttttgttttttgagatggagttttgctctgtcacccaggctggagtgcaaaggcacgatctcagctcactgcaacgtccgcctcctaggttcaagccattctcctgcctcagcctccgtagcagctgggattacaggcatgcgccaccccgcccagctaatttttgtatttttagtagagacaggttttcaccacgttggccaagctggtctccaactcccgacctcaggtgatccacctgcctcagcctcccaaagcgctgggattaaaggagtgagccactgtggctggccttttatttacatttatttatttatttatttagagacggagtctcactctttcatcaggctggagtgcagtggtgcaatcttggctcactgaaacctccaactctctggttcaagtgactcttctgccttagcttcccaagtagctgggactacaggcactcgccaccatgcccagctaattttttttgtatgtttagtagagatggggtttcaccatgttggccaggatggtctcaatctcctgacctcgtgatccgcccacctcggcctcccgcagtgctgggattacaggcgtgagccactgcggccagcctgtatttacttttgagacaagatattgctctgttgcccaggctggagtgcaggggtacaaacacagatcactgcagtcctgacctcctaggctcaagcgatcctcctgcctcagtctcccgtgtagctgggaccagagacacacaccagcattcctagctaatgttttaaatttttatagagatggagactcgctatgttgcccaggttggtcttgaactcttgggtttaagcaatccttccgtctctacctcccaaagtgctgggattacaggcgtgagccactgcactcagcctcagctattatgaataatgctgctatagacatttgtgtacacgtctttgtgtggacgtatagtatcatttctcttaggtagttacctaggagtggaattgccaggtcatatggcaattcttggtttaatattttgaggaactaccagagtgttttccacagtggctgcactgttttacatccccatcaggaatgcaaaaggataccagtttctctacattttattttttctttgagatggagtctcgctctgtcgcccaggctggagtgcagtgatcttggctcactgcaacctccacctcccaggttcaagtgattctcctgcctcagactcccaagtgtctggaactacatgcgcctgccaccacgcccagctagttgttttttgtatttttagtagagacggggtttctccgtgttggccaggctggtcttgaactcctgacctcaggtgatctgcctatcttggcttcccaaagaactgggattacaagtgtgagccacggtgcccggcccatttctttacattctttgcacttgtaattgtcactctttttggttttagctatcctagtggggataaagtggtatctcactgtggtttgaatttgtatttctctaatgtccaacagccagttaatctttcctttttttctgttttttttttgagacagagtcttgctccatcgcccaggctggagtgcagtggtgtgatctcggctcactgcaagctccgcctcccgggttcatgccattctcctgcctcggcctcccaaatagttgccactacgggtgcccgccaccacgcctggctaatttttttgtattttttagtagagacggagtttcaccgtgttaaccaggatggttttgatctcctgacctcgtgatcagcccatcttggcctcccaaagtgctgggattacagccatgagctggccaccacgcccagccgttgtgtttttttaatcgagacgaggtctcactctgttgcccaagctggagtgcagtggtgtgatcacagctcactgtaacctcctattcctggacccaagtgatcctcctgtctcagcctcccaagtagctggaattacaaccacatgccaccatgcctggatatttaattattattattattttttagagttggggtcttgctatgttgcccaggctgactttaaactcctggcttcaatcgatcctctcactgtggcctcccaaactgctgggattacaggcatgagccactgtgcccagccctagttaacctttgaatgcatattcatgtctgattttggttctgccatagcctggggaggatggcggccaagtgttctttctacctgcagtgtgtgtgtgtgtgtgtgtgtgtgtgtgtgtgtgtgtgtgagagagagagagagagagagagaaatgaaatatagtgtgggactcagggttgagaagcccagggctatggccaaatctaagattaggatgccagccaggcatggtggtttatgcccgtaatcccagcaatttgggaggctgaggcgggtggatcacgaggtcaggagatcaggatcatcctggtcaacatggtgaaatcccgtctctactaaaaatacaaaaattagctgggcgtggtgttggacacttcttgggaggctgaagcaggaaaatcacttgaacccaggaggtggaggttgcagtgagccaagatcacggcactgcacttcagcctgggcaacagaacgagactccacatcaaaacaacaacaacaaaaaccccacaagaatttcatagaaacaatgagtaattttttttagggtaagttatgtcccaaacattacatgggatatacttatcctcaaaaaggtattattgcttatctgaaattcaaattcaactaggcattctgcatttttctttgctaagtctggcaaccctgccagtcactggtgagttgtgtgtccttgagtgatggtctttgcctcttggagcttcagttttctcatctatgggatggggacagaacttgctgggaggcaccaatggcacgcggggttctttgacatctctggatgtggaagctgttgatgtgactgactgggagcctcagactggggttgggtccctgactaggaggggtgggggggctgggactggcatccttgtcctcttgaagctgcctcccagcctgagcttggtccctgcagggttcctgcttggttcagaccccaggcagccagtgttgaggggagggtggagattaatccatagttgtgtactggggctttcctccaacttcctagcaagcaagtgtgtgtgtgtgtgtgtgtgtgtgtgtgtgtgtgtgtgtgtgtgtgtgttttctcgacttagcctaatccatttgctgcatggaatgtgatccaggatcactgctactttttttttcccatttgtttgcttttgctgtgttttgtcgttgttattgttttttctaatttgtgcttcttttgtgggtaattctcagggtggattttttttttttttagaggatttactattcttctttagaacaatctgttttcctcaaagatattggtggaaggtttagtgttttggaacaaaataagcaggggttgtatactgagccttatattctaggtgctgaggactgtggtgtgtgtgttggggaggcggtgtgtgtgtgtgtgtgtgtgtgggtgtgtgggtgtgttggcagagagaagccatctaaagacttcaattttgaaaaacgttaactcaggtgtaagggacacaaggaggagaaacacgcaaataggtgtgccaaggaaaggaaatcagggacggctgcctggaggaggaggcagcatttgaactggatatcttgaagcatgatgggctggatttagaaatagggagctaaggtacaaagcacttcgccagccaaaagatagactagcctagagatgactgttatatgtttgggggaataaacaacagcaagaagaacaacaacaacaaacaacaaaatagctgacattagtgcagcacttactatgtctcaggcactgtttgagtgcttgccctgagttgtttcacttcttcttccatataagccatgttacagaggaggataggagtcttggagttgtgcaagagttgtgggcaggcctgtttagtggtgtgcaggggatgtaggggcagaatcttgagggaagtgcaggatgatggggagccatggtgggcgttggggcctgggagggaccgccttcaggagaatgagaactcagggcatttgggcaatggagatcgggctccctgggaagccctcaccacacccaggtaaaaggtaattaggtcttgattgcaggtcaggagagcagtccgggaaggaaagtcagccagcgaggtgggaggattgacaaaacaaatacatttagctttccttgccccatttctgaccgcgggcacctttatccccgtaaattatctcctgaagatcttctatgttgacgcactggagacagttcccctttctccttctgcacctgccgcgttactcaatcccctgtaatcccattgtcccgactgcatcatttcagaggtggtgattttaaggattttaacagggcttgccaaaagaattattttcttggcgttttgaaagtaattacttaggcatgggtactttacagagaaagctactcatcccggctggctgcagagtttacagggcccgggatgaaaacacagggcccaggtttcctgtccatgaagccggctctgcccctgatccttctgatgcatccaccgtgcgtctgctcacctgtcttgctttctgttcattttctcttgtagtgtgtcccggcatggatatccggaacaacctcactaggttgcatgagctggagaattgctctgtcatcgaaggacacttgcagatactcttgatgttcaaaacgaggcccgaagatttccgagacctcagtttccccaaactcatcatgatcactgattacttgctgctcttccgggtctatgggctcgagagcctgaaggacctgttccccaacctcacggtcatccggggatcacgactgttctttaactacgcgctggtcatcttcgagatggttcacctcaaggaactcggcctctacaacctgatgaacatcacccggggttctgtccgcatcgagaagaacaatgagctctgttacttggccactatcgactggtcccgtatcctggattccgtggaggataattacatcgtgttgaacaaagatgacaacgaggagtgtggagacatctgtccgggtaccgcgaagggcaagaccaactgccccgccaccgtcatcaacgggcagtttgtcgaacgatgttggactcatagtcactgccagaaaggtacgccggggatacagggttctaagcagtgtctcgtgccttgttctagaaagcttaaaatgttttatggcttaaaaatgttaaatggtcattaggtaggggccggggaatagtgggtggtggcattcactagcccagggagtggcagacattttctgtaaagactcagatagtagatacttcagattttgcaggccatatggtctctgatgcaacgactcaattctgccactgtattggacaagcagccacaggcatgcataaatgtatgactgtggctgtgtttcaataaaactttatttacaaaaacaagtcgtgggccggattttgctcgagggcagcagtttgccaccgcctgtgctagtcagtgaatgttcttcttgcttgggagaggaaaaggagtggaaaactgtagattcggtttttttaaaaaaatagtttagttcttatctgattatagaagtgatattgcttataatagacatttggaaaaagacacttgtaaacgaaaaaaaagcaaaacattcatcttattccacaacgcatgtcgccgagagtagtttattgggggttgttccttctagtgatcttcaggaatctgtcgtgtctactgaaggtttccttaaccattcctgttattgggcattaagatgatttccaggccgggcacggtggctcaggcctgtaatcccagcacttggggaggctgaggcgggtggaccacttgaggtcaggagttcgagaccaacctgaccaacacggtgaaaccccatctctactaaaaatacaaaattagccgggcgtggcggtgcacgcctgtagtcccagctacttgggaggctgaggcaggagaatcacttgaacccgggaggcggaggttgcagtgagccgagattgtgccattgcactccaccctgggcaaccagagggaaactccttctcaaaaaaaaaaaaaaaaaaagataatttctagttttcacaaagagagtgatgaacattttagagtcaaagctttatctagcagttgtttctttaggcttgctttccagaagtgcaatttctgggtcagaggctcttggtgcagattgacaaatggtgttccggaaatgttgtgccaacggccactcctcctagctttggaggagagggaacaccttggccagctttgagtgttatttgaaaaatctttcataatttactgcgggagggaggagctgacgtgttgtcattgtttctatttgcatttctttgattgctatcggggttgaaccttttaaaacatgtttatttatcatttgagttttctcttcctgttcatatcctttgcccatttgtcttttagtacctcagtagcttttgcaaaattaatctgtatgtggttttcatcagtgaaggctactaaccctttgccaattgcattttgttgtttttgttgttcagtggtttaaatgctctgggaagtgttttgctggagaagcttaaaatgtttatggagttcagagctggatttcagtgtgccacttctgtactttacacttagaaagtcttcttctacccatgaaaggttttttttctctacattttatattttaattttttttttttttttgagatggagtttcactcttgttgttaagactggagtgcgatggtgcaatctcggctcactgcaacctctgcctcccgggttcaagcggttctcctgccccagcctcccaagtagctgggattacaggcacccaccaccaagcccagctaatttttgtattgttagtagagacgagatttcactacgttgaccaggctggtctcgaactctcaggtgatccacccacctcggcctcccaaagtgttgggattacaggcgtgagccaccgcgcccagcctatattttaattattattatctaaaaaaattcatcctcactacttgagatctgtttgtgtgtgtgactcaacgggcgtttcgtttctctcccaaatagctaactgggggcctcagacagctgttgattatagaaatctacctctttgccattgctttggggtctgtttctggtgtgtccatagatctgcctctccatgccacagagcggtgactgttctgatcatggtagtgactgttctgatcatggtagttttatcatgttttcatgctcaaggaggcaattccacattcacacattacttgtttgttgtttcatggacttcttttcacatttccctgggaagaactagggaacatgcgatggaggtgggaagaagttaagtgggtggcttgagggttgtatcacaaaagatagaagggaggggagaaaggaggatcttcttatctgagcccaacgctctggggaagccacccagagtgagtgagtccttaaatagacctaaatagaatccttggaattgtctgtgaggactcccttggagcccccagcatgagtccttccatgggacatgttggatggttggaaatcgggagtgggatagttgaaaaaggaagatgggttagtgaagggtggtgggagaggggaccgttattattgcactgtggaaaaatcctgagaatattgtaggtcaggggcaaggagaagctaaactatgaccagagaggttacttaacttgcccagagccacacagctaataaaagacagaactggggtttgtgccaaatttatgcaagacatacaccagaataaaagctatgattttttggaggagtgggaaggatgtcctctctgtttagaaacaagtgagctgcttctagctgggacaccaggggaaacagtgaacattcttttattctattactgagttttccaaatgtagtgcttgtttgaaaagctctaggcctacctatcttgagatataatttaagacattcctctatgaatttatttttgtatctgttttagacaaaatatccagaatggtgttatctgcaattgagtctcctgctccctgctgggtgttcagttgttgttgctgttgtttgtttgtttgtttgtttttgagacagagtctcgttctgtcacccaggctggagtacagtggcacaatctcggctcactgcaacctccacctcctaggttcaagcaattttcctgcctcagcctcccaagtagctgggattacaggtgtcaccacatccggctacttttttttttttttttttgagatggagtttcgcttttgttgcccaggctggagtgcaatggcatgatcttggctcaccgcaatttctgcctcctggcttcaagcgattctcctgcctcagcctcccgagtagctaggattacaggcatgcgccaccacacccagctaattttgtatttttagtagagatgggatttctccatgttggccaggctggtctcgaactcccgacctcaggtgatctgcccgccttggcctcccaaagtgctgggattacaggggtgagccaccgtgcctggccaacacctagctaagttttgtgtatgttgtagagacagggtttggccatgttggtcaggctggtctcaaatttctgagctcaagcacctcggcttcccaaagtgctgggattacatgcatcggccactgtgcctggctgtgcctggctgtgcctgatgttttgagtgaattaaaaattgctttgctattaagaaccaggcttttgtgtccaggaggtcgaagctgcactgagccctgttcatgccactgagctccagcctgggtgacaaactgagactctatctcaaaaacaaaagaaaacaaaaacaaaaatgaacacaaaacaaaacaataaaaagaaccgggcttgtttttccagtactgggggttttgttacccggagaaggtgcgactaacacttcccggggtaccgggttcctggcatgtggtatatatctcagccatccattagtagcagtatccccagggggccaaaaaatgattgttttttgaactgttgcccctgtctttgagagcaactcagcttcagctttctttcccctcttcaatttcttgtattgtgataaaatacacatagaataaatttttcatcttaactttttttttttttgagatggagtcttgctctgccacctaggctggggggcagtggtgtgatctcagctcactgcaacctccgcctcctggattcaaatgattctcctgcctcagccttccgagtgactgggacttataggcaccagccaccatgcccggctaagttttgtattttcaggacagagggggctttgccatgttggccaggatggtctcaaacccctggcctcgagcaatacacccacctcagcctcgcaaagtgctgggattacaggtgagtgccaccgcgcctggccccatcttaaccattttaagtccacagttttcagtggcattaagcacgttcacgtggttttgcaaccatcaccaccaccatctcccaaactttctcatcctcccaaactgaaactctgtccccatgaaacactcactccaccatctccctctcccagccccctggcacctaccatcctattttctgtctctatgaatgtgatgactgtagggacctcctgtgagtggaatcagacgggatttatccttttgtgcctggcttatttcactgagcatgttgtcctcaaggttcatccacgtggtagcctgtgtcggaaattctttcctttttaaggctgaatcatgttccattgtatggagggagcacattttgcctgtgtattcatccatctacgggcacttggtcgctttcacatttctgccattgtgaatcagggccactgctgttgacgcatctagcttttcaatgcctgcattaaccttgttgctgaggctttaggaaacttatttatttatttattttttgagacggagttttgctctcgtcgcccaggctggattgcaatggtgcgatctcagctcactgcaacctctgcctcccgggttcaagcgattctcctgcctcagcctcccgcgtggctcggattacgggcacctgccaccacgcccagttaatgttttggatttttagtagagatggggtttcaccatgttggccaggctggtcttgaactcctgacctcagataatccactggcctcggcctcccaaagtgctgggattacaggcgtgagctaccgcgcccagccttaggaggcttatttgatgtctgatgggatttttgaatacagaatagattgagccttcagaggatactcccctgtcttaggtgacagaaatgggctggagaaaactatccatcaacccctcttttcccccagagtcttttcagatacttctgtgaacatccgtagttgctatttttgtcttccacacttggcagcttctggaagcatcaggggaatgcatcaacatttaggatgaaggtgctggtttgtcctttggacctagtttaagcaattccgagcaacatccaccccttcttctacctgtcccttaagcactttttacagggagaccaaaaaaaggctttcaatggttaagggggccgggtgtggaggccccacacctgtaatcccagcactttgggaggccgaggtaggtggatcgcttgaggtcaggagttcgagaccagcctggctaacatagcaaaacgctgtctctactaaaaatatgaaaattagccaggcgtggtggtgggcgcctgtaatcccagctacttaggaggctgaggcaggagaatcactcgaacccgagaggcagaggttgcagtgagctgagatcgtgccattgcaccccagcctggccgacagagtgaaactccattttttaaaaaaagaaaaaaaaatggttaggggaattaaaagaaaaacaaaaaaacatggcatgtgctaatgatccatagcctggacaccctctctccattatcctgcaatggatttggggcaaagataccaggagaggtccaatgcacgaagccttacatgggaagagtggagacggggtctatgcagttcgtttattgactgcctactaggtgtcatgttctggggcgctcagggcataggaagggagccagcctttgcctcctcagagcggccagtctagtggcaaatgcagatgttcacgatcaaaccaagtacactcagaagagggggagagttagagggagatctacattagttcagccagctggacgcggtggctcatgcttgtaatgccagcactttgggaggccgaggagggcagactgcttgagctcaggagttcgagaccagcctgggcaacatggagaaaccccgtctcgacaaaaaatacaaaaattagccaggcatggtggcaggtgcctgtaaccccagctacttggaaggctgaggtgggaggatcgcatgggccccgggggcggaggtcgcagtgagctgagatcacaccactgcactccagcctgggcgacagagtgagactcggtgagactctgtctttaaaaaaaaaaaaaagaagttctttgaggcaagcagcaccggcttccagtctcgttttaccattgactggtcacaagctggttcaagcctcagtttctccatctgaaaaatgggggtcattatgggacctgcttcttagggtggtggtgtgggggttgaatgagatggtgcagggggaggcacttaacctagcctcaggtgctccgtgagtgtcctggaagcttccagtaagtaagcaccatgggcccaccctatctgggcagactagcttccaggtgaatatctaccagggctcagcctcatttctgactttggttttgaggcaggcagaggaacatgtatcttgcgacctgctgatgagggatgggtgccacacctccagccccagagggaagaccaccctgatttttgggtgccaacagcatgggatgctctggaaattctcagctctgggcattttgaggggaccagaagccacagggcttgcctgaccagctgctttagccaaacccactggcattttctttctgggaggtcaccccagctgctcactgccggccagaggggtgggtgaggccgggacatgctgggtgccaggggaaaccaacccgagatgccacatatggacgtcggcaccaaagcaggagggggaggctgaaagcagcaaatccctcctccctgggtctgagattacagctccgagtcaaagtctctcaaagtgtggtattgtgcctaccacattaaatatcacgtatttaaatgcacgagtttaaatgcatgctcttggagggtttgatttttggcagaatttttagctgcctatggaaactctctgcttctttttcttcttccatttaaaaagtttgccttgatattttatttttttacatttttatttagtttttaatatttttttaaattgagatgggagtcttgctatgtggctcaggtcggtctcaaactcctggactctaaggaatccccccacctcagcctctcaaagtgctgagatttcacatgtgagccaccacgctggacttgacttgattttgttttctttttcttttttttttttttgagacagagtctcgctctgttgtccaggctggagtgcagtggcatgatctgagctcactgcaacctccgcctcctgggttcaagcgattcttctgcctcaacctcctgagtagctgggattacaggcacgtgccaccatgcctggctaatgtttgtatttttagtagagatggggtttcgccatgttgcctaggctggtcttgaactcctggcctcaagtgatccgcctgccttggcctaccaaagtgctgggattacaggtgtgaaccactactctgggcttgccttggtattttaacaatcggaattgtctttgtggcaaatgctgatttcatgccagccgtggttctgggtgctttgattaggatattgcatcccatcttcccaacaatcttatttattgttgagaccactaaggcttcgagaggttaagcaacttctacttccaacactgccccgcccaccccttccgccgcgcaccccacacacatgggtagtaagtagtggagatgggatttgaagctggggattctggctcagaatccaagctctttacctttgtgtcttatagatgtcattgcgggaagttggtgaaatgcaggaaactgtaaaaagaaaggaaggaaggagggaaggaaggaaggagggaagaaagaaaagaaaaggaaggaaaaaaggaaggagggaagaaataaaaggaaagaaaggaaggaaggaaggagggaaggcgggaaggaaagaaggagggaaggagaaaggaaggaagaaagaaaggaaggaaggagggaaggaaaggagggaaggagaaatgaaagaaggagtgaaggaaggaaggaggaaagaaaaaaaggaaggagggaaggaaggaaggaagaaggaaaggaaggagggaaggaaggaaggaaagaaggaaaagaaactggagaggaaatctagaatttgcccctgccaacatgtgtgttgcctcttcttatcagccttctcattctgtcttgacttagggcctctcctatcagactaagctctcctgaaggcagggactttgttgtatctcaagcacctgtcatagtacctggctcacagttgacaatgacatccttaacactcatcaatagctagtgtttactgagcacttactatgtgctaagcaatgccttaggggatcccatcacagcctatgagggtttgttatcctcattttacagaagagggaactgaggcatggctaggaattatgagacttgctctaggagacctagctggggaatggtttgacttcagacttgtctgacgtaaggcctttgcccagtgatcagcaaactacgacctgtgggccaaatccagtccgccagctgctatttttgtatgacctatgagctaagaattttttattttatttttatttttagagatggggtctcactctgtcgcctgggctggagtgcagtggggtgatcataggccactgccacctcagtcagcctcctcagtagctggaaccacaggcaggcaccaccacgcccagctaatttctttttatttttttagtagagatggggtcttgctatgttgcccaggctggtctcaaacaattgggttcaagcaatcctcctttcttggcctcccaaagtgctgggactataggcgtgagccactgtgcttgcctggcttaagaatgctttttcacatttttggccgggcatggtggctcatgcctgtaatcccagcaccttgggaggccgaagcgggcagatcactcgaggccaggagttcaagaccaccctggccaacatggagaaaccccatctctactaaaaaatgtacaaacattagctgagcgtggtggcgggcacctgtaatcccagctactcaggaggctgaggcaggagaatcacttgaacctgggaggcggaagttgcaatgagtggagattgcgccactgcactccagcctgggtgacagggtgagactctgtctatatatgagctggacattcagcattcagggatagaggctgtttcagtgggacttgggagcaccacggcctgaggccatacagcccagctgccctttgctggtacttccttccttccttccctctttccttcctttctttccttttctttcttccctccttcctttcttccttccttccttactttttgagactctgtctcaaaaaagaaaaaaagaaaaaaaaatgtggggtagagcactgtactgaaaaaaattccacagtagttgtaattcatttttcactcagatgattagcattttttttttttttttttggagctctctgtttgggtggaggagggcagtatatgtacaaggcaaggcccccactccaccctcctccctcctcccaccccgcctttccccttcgagtgagtcatcgaacccgtgcttctagacgtgtttggagcagagcacctggaaatcatgatgttctctagataacagggaatattgataaattcccttgtggcgatgtcactgtcgtccatacagaagacaggaaagtgtaacgcctgcacacggggatccaacaaaaagaaaaagataaggtgggggaggccgggcacggtggctcaggcctgtaatcccagcactttgggaagccaaggtgggtggatcaactgaggtcaggagttcgagaccaccctgggccaacatagtgaaaccccgtctctactaaaaatacaaaaattagctgggtatggtggtgggcacctgtaatcccagctgcttgggagactgagacaggagaatcgcttgaacccaggaggcggaggttgcagtgagccgagattgtgccactgcactccagcctgggtgtcacagcgagactccatctcaaaaaaagaaaaaaaaaaaaaaaaaaaaaggtagggtagagcatgtaacgtgaatgatggcccacttgaatctctcattcgtctttcttcccttttatgttgtcaaagatctttaaaaaaaaaatctaggagagaaacaaacaaaaaaaactgtactgaaaaaaattccacagtagttgtaattcatttttcactcagatgattggcatttttttttcttgttttttctttttgagacaagggtctcaactctgttgtccaggctggggtgcagtggcgcaatcttggcttacttccgcctcctgagtagctggaattccaggcacgcaccaccatgctggctaatttttgtattttttgtagacatggggtttcaccacgttacccaggctggtcttgaactgctgggcccaagcaatccacctgcttcaacctcccaaactgttgcattatattataggtgtgagccactgtgccagccaggattggaattatttatttatttatttagtgagatggagtcttgctctgttgcccaggctgaagtgcagtggcgcaatctcggctcactgcaacccctgcctcccgggttcaagtgattctcctgcctcagcctcccaagtagctgggactacaggcgcccaccaccacacccggctaattgttgtgttttttttgtatttttagtagagacagggtttcactatgttggccagggtggtctcgaactcctgacctcaggtgatcctcccactttggcctcccaaagcgctgggattacaggcgtgagccgccatgcccagcccttatttattcatttttattttattttaaaataaaataaattttaaaaatttgattgaaattttttaaacaaacttttcactttggagatgattggattttgtagagcaggaaagaacaagtaccctagagagtatgtttctgggctcccggctcctcttccgggggttgaagatgaattgccgttggcctttgtaaaagaggagagattgttccagattggagtggcagagatgtgctttggtttgggtggcaaggatcacaaagaaagaagatgaggttgggtgtggtgggtcatacctgtaaacccagcactttgggaggccgaggcaggaggatcacttgaacctagaattcgagctcagcctgggcaacatagcaagaccccatctctacaaaaaattttaaaaaattagccaagcatggtgctgtgtgcctatagtcccagctactcaggagtctgaggtgggaggatcgcttgagcctgggactttgaggctgcaatgagctatgattacaccactgtaccccagcctgggtaacagagtgagaccctgtctcaaaaacaaacaaacaaaaacagaaggaaggaaggaaggaaagaaagaaagaaagaaagagaaaagacaagacaagaaaaaaaaaaaaaaagaaaagacagggtgagagggaagggtattcgggtggatgaaatggcaaagagaaggccaagaggcgttttgtgggcaagagtgaagagggtgcctcatgccgggaagggaggcttggaccagtgcagggtccttatgggctccaatgccgtcatgaaggtcacacaggggctgtgtttaggaggggctgtttccaccaatactgagtggacagccttgctgagccaggctttttgttgcgtccccgaagtccttgctgagtcagggaggaagtcaaagtaactatcaggttagataagctgatgggtgggcagaaagtgttttggtgggttcaaggctgcgctgaaagatggtagaccagttgaccgtgtggtcacttggctgccccagagatgatgctgtctaaatcttgagtggtgaagataacgaatttacaattcccaccattgcctggcttcctggagcgggtgggtgcggggaccggggaggggggccgggggaggctgagggctatcagttgaaactgaccttttggcccaatccttttgggaagaaggcgggtagagttaaaatccatcgtaatggaaaggcggctttccctttggctgtctgctaacttggtgactggcctgacaagtttttcttttccttcctcctacctgatactcactgaccggttacttcccatgtcacccgaccctttgtcagaattaaaatctgttctttgtgactgaacacctgaaatgccccggggaggacccaaggaagtcagcgagcgcctgtgcgtcaggctggcagcccaggtccttcagtgatctgtttctctcaatgcgcctgtgtcagatagaaccgtgcatttcccagtaaaaggaggtgatgtgtgtgctggagtttcaagattgtaccccttatcctatctcccctttcctctgtcttccctctctacttttttattttgttgtttgtttgtttgtttttgagatggggtcttgctctgtcacccaggctgcagtgcagtggtgcgatcatagctcactgcagcctcagccttttgggctcaagcaatcctccagcctcagcctggccagtagctggaactatgggtgcatgccaccacgcccagctaattttatttacttatttacttatttattaaagagatggagtcttgctatgtttcccaggcagctcacaaattcctgtcctcaagtgaccctctcgcttcagcctcccccattagctaagactacaggtgcgcaccaccatccctggctaatttattttttaaatttttctttttgtagagatggggattttgctatgttgcccaggctggtcttgaactcttagactcaagcaatcctcccactttgggaagcccaaagtgttaggattacaggtgtcagccaccaggccgacctgtttgctcatttttccttttccttttttcttttcttttcttttttctttttttttttgagatggagtttcgctctgtcacccaggctggagcacagtgacacaatctcggctcactgcaacctctgcctcccaggttcaagcgattctcctacctcagcctcctgagtgctgggattacaggggcatgccaccacgcccggctgatttttgtattttttagtgaagacggggtttcaccaggttggccaggctagtctcaaactcctggcctcaaatgatccaccagcctcagcctcccaaagtgttgggatgacaggcgtgagccaccacactcggcccgtttgctcatttttaaacataaatgatgtcaagagtgggaagcaaacaagaaagtgttgaaagcattgctctcctctgctccctggttacctatcatcctggggcccgaggagtggctgcagattgggccaccttcctccaatcacaggtttgggaagtggaccaaagtctttcaacacactggacttagcatgatcatcaaatttgcactggaggggccaggcacacgcctgtaatcccagcactcggggaggctgaggcgggcagatcacttgaggtcaggagttcgagaccagcctggccaacgtggtgaaaccccgtctctactaaaaatacaaaaataagccgggctggtggttggaacctgtaatcccagctactcggggggctgaggcaggaggattgcttgaacccgggaggtggaggttgcagtgagtcgagatcacgtcactgcactccagcctgggtgacaaaagcaaaacctcgtatcaaataattaaataaataaataaacaaataaataaataaaaaattacactgtagggcatgtggtaggtgaagcccaccattgtcaagtacctacctagagggtttggggtagagggtcctgtggcttcttctattttttttttttggcggagtctcactctgtcaccaggctggagtgctgtggcacgatcttggctcgctgcaacctccgcctcccgggttcaagggattcccccgcctcagcctcctgagtagctgggactacaggcgcccgccaccacgcccggctaatttttttgtattttagtagagacagggtttcaccatgttggccaggatggtctcaatctcttgaccttgtgatctgcccgccttggcctcccagggtgctgggattacaggcgtgagccaccgcgcctggctgtggcttctttatcctagaagtttctttgcctctcgttttgtcccaggcgaggagggtcttggatctttaatgactccatggcttattgagtgtagcccagaaagaatggttgtttaataggctttattaccgagtgtttccaagggcttacctggggaaggaaaacatttttactcggaggtctgataaggatgggctttaaagcgctggcagctagtcatgtccacacgcggtgtgcgaagcacggcgttgtttactgaccacctgcaaagcccgtcggctggtgaacaaggctcttgtcccaggctgcctcattggtggtgatgatgttaagagtttcctcatttgcaaataaattgactaacctagcagacgggtttgatccaaagtggtcaagattccttttctttaaatttgttttttttttgagatggagtcttgctctgtcacccaggctggagtgcagtggcgtgatctcagctcactgcaacctcctggattcaagcgattctcctgcctcagcctcctgagtaactgggattataggtgaacaccaccacgcctggctactttttttgtatttttagtagagatggggtttcgtcatgttggccagaatggtcttgaactcctgacctcaagtgatccacccacctcgacctcccaaagtgctgggattacaggcgtgcgccactacgcactggcaaatttttgtattttcagtagagacagggtttcgccatgttggccaggctggtcttgaactccggacctcaggtgatccacccacctcagccacccaaagtgctacaattacaggcgtgagccaccgcacctgggctattttcacttctttcgaagttatacctaggagtggaatcgctgggtcagttggtaattctatatttaattaatggaatcaagatttctttttcttttctttttttggttttactttaaaaaattctatcttattacataaaaaaaccacaggttcagaaaagccacaccaaacaaatgaatagcctaatggttcactctaacgtcaacactcatataatccctaactctggttgagaaatagtactttgccagaacaccccctccaaaagccatgccacggaccacatcctagtcacaggcctcttcccccagagtagtcactgtcctgtcttttgtagacatcacttccttctttctgtatagttttatcacccaagtgtgaatctgtagacaaatatttagctttgcccattaaaaaaaaaaattgatggccgggcatggtggctcatgcctgtaatctcagcactttgggaggctgaggcgggaggatcacttgaagccaagagttggagaccagcctggacaacatagtgagaccccatctctactaaaaataaaataaaaaattagccgagcatggtggtgcatgcctgtagtcccagctactcgggaggctgaggtgggaggatcgcttgagcacagaaggttgaggctgtaatgagccgagattgcatattgcactccagcctgcgtgacagagcaagaccctggctcaaaaattaacacaataaaataaattgatgtgtttgtttgggtctctagcagtggttttgaactgagggtgattttttttgtctcccaggggacatttggcaatgtctggagatattttttggttgtcacaactccagggaatgtgtgtgtactgctttcattgagcagatggaggccagggatgccgttcaacgtcctgcaatgcagagacagcccagccacaaagaatgatccagccccaaatgtcaatagtgctgaggggcagaaagcctggtccacaggttctccctccatccctttccttttaccttctctctgttgaagagctgggctttctggcttggggtgcagtccccagtctgagtgttgctgatcgtacgttcctgggacagttctgcttgcccctctgagctccagactcagagctagggtcacactcaggttctacctcttggactgactttatttaacaagtaccatttcagcactctctgcagtcagctgttttcaaaggcgaccatgcttgatgctgttcgtttgcacatggctctgagtggtggtgtgttctttgattttttttctttttcttttgttttaaagaaaaacacaccgttttttaaacacggttgcccgaactctcatcttcttcctccctgccctccctccctccctcctctccttccttccttccctccctccttccttcctttttctttatttcctcccttccttccttctctccctccctctcccttcctccctttatccttctctctttccttccttccttctctttcttttctttctttcttttcttccttttctttcttctttcttttcttctttcttccttgctttctttttatttcttacctcccttccttctctcccttcctctctccctcctccttcctctttccctttctccctcctctttctttttctctctcttcctttcatttttctcccctcccctccccttcttctcctcccctccttcccctctcctccttcccatcccctctcttcccttttcttcctttccttcttttccctccctctctctttcttttctcctttcctttcctttccctctcttttctttctttcttttctttcgacagggtcttgctctgtcacccaggctggagtgcagtagcatgatcatagctaacagcagtctggaactcctggtctcaagccatcctcccacctcagcctccagagtagttgggactacaggcccctgtcaccatgcccagttattttattttatttttttttgagacagagtctggctctgttgcccaggttggagtgcagtggtgcgatctcagctgtctgtaacctccacctcttgggctcaagtgattctcctgcctcagcctcctgagtagctgggactacaggcacctgccaccacgcccggctaattttttgtatttttagtagagacggggtttcaccctgttagccaggatggtctcgatctcctgacctcgtgatccaccctccttggcctcccaaagtgctgggattacaggcgtgagccaccgcgcccagccgctaatttttttttaatttattttttgtacagatggagtctcactatattgcccaggctggtcttgaactccagggctcaagcagttctggcacactagcctcccccaattcaatgggattacaggtgtacccattttttaaaaatgggccagactaaatatttgtctagagatccatacttgagtgataaagctatatgaggttccatctgggaattcggttctgcggtaaaacggtgccgacgggcctccctttttttagtgtctgacaaacagggcacagaccgaacttcataacaaaactttgtgttcttgacgaaggcaagttttgctaagaaaattatttttataagcgagaaaggtatgaaggttatttgcaaaggaattttactggggtgagaaaaaaagcaagaggtttaccttaggattcctggtggtaaagaagatggaatgggcagaagacgtcatcacagatgtcacggggagagcgatagctgaacctctgaaaggaaagaggttcccagggaaggatgaatttgatgcaggaaaaaagttagaggatggtcttaaatttgtcaatgtagttcagaggaaagtgtaattcttcacagacttttagttttgaaaggatggcttcaaaagatactgggggacatgggcgcagtaactcacgcctgtaatcccagcattttgggaggccgaggtgggcggatcatctgaggtggggagttcgagaccagcctgatcaacatggagaaaccctgtctctactaaaaatacttaattagctgggcgtggtggcgcatgcctgtagtcccagctacgtgggaggctgaggcaggagaccatcgcttgaacctgggaggcagagtttgcagtgagccaagatcacgccactgcactccagcctgggcaacagagtgagactccgtctcaaaaaaaaaaaaaaaaaaaaattctggccaaccgggaatagtccaggataatccattcttcagaacttgttcttgctaactcagttaagtgtcgaatggcgtgggttgtctactgtattttagaggacattagaatatttatgaagggctttcccaggtttactcataacttcattttcctcatgctatttgtcccttaaagtctttctgaaatctttcagttgccacttcttctgggtgggtgggtatgtatgttgagggtcatgctttttttttttttttttttttttgagatggggtctccctctgtcgcccaggctggagtgcagtgatgtaatcacacctcactgaagcctcaacctctcaggcttaagtgatcctcccacctcagcctcccaagtagctggcactacaggcatgaaccaccgtgcctgactaatttttaaaaaatatttttgcaaaattagccaggcgcggtggtgcacgcctgtagtcccagctacctgggggactgaggtgggaggattgcttgagcctgggaggttgaggctgcagtgagccaagatcatgccactgcactccagcctgggtgacagagcgagaccctgtctccaaaaataaaaaaataaaaaataaaaaataaaagatggagtcttgctgtgttgcccaggttggtcttgaactcctgggctcaagtgatcctcctgccttggcttcccaaagttctggaattataggcatgagccactgcacctgtctgggtcctgcttttggtagtgatatagaaccaacttagtgaaattctagaatgacgctgtccactaaggtagctctgccagccacagccacatgtggcaatttaagtagaaattcattaaaattagatatttgtccctcagttgtactcaccatatttagacaatgcagacagacaatgttgctatcactgcaaaaacttgtattgggtacctctgccttagaacttttcattccatgatgaaagattgttctggagtcagacaggcctgcatttgaagcctatatctgttttgtgaccttgggcaaattgtctagcttttctgaatgtctgttttttcttctatcatgaggacatgataagggaaccagtctccaaggttttcctcagctttgaactggtatatcccctctttcgataaaaataaaaatccagttcctcttccctacttggagtttgttcttttttcctctaaatataaaatataccgttgaatgttttttcaacctctccaccccttgagagtccctggaatagagaggaaggagtggcttgggaaagttgatcacaacaaagaggctattataggtacatctaatcgagaagaggaacaaggaaggagtaggtgtgttgaccggggctcagagtgtcttgtctgtgggtcaccaagaatgaggaatgtgtcagctccttcctggcttctcctctctgggaacagagaacagtgcattgcagcttaagtggagtaaaatgggtgtgggtttggaggaagtggattaaggatggggaaggggccgtgggagagaaccccagcctgagtttgtcttcctggctcagcactgagtgtctcagtcaacacatgaatgccagtaatgggaatctatttggattcacttaagccatgaggtgggggcagtgtgttaactggggcaacacagggctctcagcttgaatcagctagcttttgctgtgtagcaaaccactctgaaacacagaccttggaatttatattcaagtttaatcatggagcttgtatcagctagcttttcctgtgtagcaaaccactctgaaacatagaactaggaacttgtatccaagttcattcatggagcttgtatcagctagcttttgctgtgtaacaaaccaccctgaaacatacaacttggaacttgttgtatccaagttcagtcatggagtttgtatcagctaatttttgctgtgtaacaaaccaccctgaaacatagaacttagaacttgttgtatccaagttcaatcatggagcttgtatcagctagttttgctgtgtaacaaaccaccctgaaacataaaactgggaacttgttgtatccacgttcaatcatggaacttttatcagctaacttttgctgtgtaacaaactactctgaaacgtaatggcttaatcaacaatcatgtacttagctcatgattctttgggtcgctgggcaagttttcttgtttagacccaccagctgaccacaaacacaggctcttttctctctcatgtctgggatcaaccagtgggttgtctggtagctggatggtctagcatggcctcactcacatgtctggtggttggtgctggctgtcagctgggaggccttggttttcttccctgtagctgctcatcctccagttggctagtttgggcttagattacatgatagtctcagcgttccaagagtggcaagagatcaatttccagtacaaaagtgccttttgagtttctgtttgcatcttgtgtgctaacatcccattggctaaggtgagctgggagggaaagggagaatatagtctttacctgttgatggaagaggaagaatttgtggccctgtttgccatctgccaaagaaccctggagtgggaaacagtggggctcataaaacatttttttaaaaacctcttattttaggttcatgagtacaataacattttaatcagaatttggagctcaattggacatcaggactgtgtatggtgtgactgaggacattaaatgatttttttttgagtaggaatttaactttatgaattccacttgttgaataaccaattccttccccagtaattcttgatgttttcttcatcaggtattaaattcaaccaaaaccatgaatttgcttttgggatatcaattctatttcaagtcctctgtgtcttaatcttatcccagtaccatactgtttatagatttagaatatgtgtttttttagttttgtttttgttgtcgttttgtttttaaagaagtggggctcggctgggcgtggtggctcatgcctgcaatcccagcattttgggaggccgaggtggctggatcacttgaagtcaggagttcgagaccagcctggccaacacagtgaaaccccgctactataaatacaaaaattagccgggcatggtggcacatgcctgtagtcccagctacttgggaacctgagacaggagagttgcttgaacttgggaggtggaggttcaatgagccgagattgtgccactgcacttgagtctgggtgacagagcgagattctgtcttcaaaaaaagaatgggggctcactgtgttgcctaggctggactcaaactcctgggtgcaagtgatcctccttagcctccaagttgctgggactacaagctcatgcctggtaagaacatgctttataaagtggcaaatctagttttttccctattacaccttttagaagagtgtttccttttctggttgaactaaatatttccctcctctcactctcatataaaacccattgagggctgggcgcggtggctcacgcctgtaatcccagcacttggggaggccgaggcaggtggatcacgaggtcaggagatcgagaccatcctggctaacacggtaaaaccctgtctctactaaaaatacaaaaaaattagccgggcatggtggtgggcacctgtagtcccagctactcgggaggctgaggcaggagaatggcgtgaacttgggaggcggagcttgcagtgagccgagatcatgccactgcactccagcctgggcgacagagcgagactccatcttgaaaaaaaaaaaaaaaaaaaaagcaaaaacaaaaacaaaaaaacccattgagatattgatttaaaaatttaattaaaaacataacccatttcccagaggaaaaaaagtgcagctcgctgccagcactcctttaattttacataaacatgttctttgaggctgaagcaaatctgactgattttcaatatgagaaaatataaaacggttcttggagttatttctaaacagaacttgtctctaatcttaatgtaacagaaatgtctataatgttacattaggattagagaatagattattcttgggacaaatggaaaaatgggttaaaatccataaattaagaaatcaatactttcgtatttttcctttccgggcaggtatgggatctccttttccatttgctcaaatctttttttttctttttgagacagagtctcgccctgtcacccaggctggagagtagtggcacgatctcggctcactgcaacctctgcctcccaagttcaaacaattcttgtgcctcagcctcctgagtagctgggattataggcacacaccaccatgcccggctaatttttgtatttttagtagagacggggtttcaccatgttggccaggctggtctcgaattcctggcctcaagtcatctgcccacttcggcctcccaaagtgctgggatgacaggcatgagccactgcgcccagccaatttgttcaaatcttttatattgtcctttcttcatctttatcctgtattatttttgtgacgatggttcctgatttctgtatcacagagttttgttgtgttagttatggctactatgaatagcatatttaccctgaatccagatactttagtgaaattgattggtaggtttttaaattgttttattcattgtgtgcaatttcgtcctctacaaattatggtcatttaaaaaaattatgtctgctcagttctggaagcatgaaaaaaattatgtctaaaatcatacctcttgtttcggttttaaatcttattctattgaccagggcttctagactaacattaaatatttaacaatggtattatccgacatctatgtttaatagatttcctaatataaaatcatccttgctttcctgtggtaaaacctacttggttgtgatgaattattctttcagcataacgttgaattcgatttgctaggtttgctttgtttcgttttctgaattcttgccatctgtgttcatgagtgaaattgggctatgtttttggttggttttattttgcaatgtcttcatcagtttggattatttattgtgttctagccacataaaatgaaatagcaggtaactgagtattcattgacaaattttatggtgccataacttttggggggaagcaattctttgataacttaagaaaaaatttaggccaggtgcggtggctcatgcctgtaatcccagcactttgggaggctgaggcaggtagatcactggaggtcaggggttcgagaccagcctggccaacatggtgaaaccccgtctctactaaaaatacaaaaattagccaggtgtggtggcgcacgcctgtaatcccagctactcgggaagctgaggcaggagaatcacttgaacccaggaagcggaggttgcagtgagccgagatcgcaccactgcactccagcctgggcagtagagctagactgcatctcaaaaaaaaaaaaaaaaaaaaaaaaaaaaaccaaaacagtgtgtgactggctgtgacgtaaggcagtcagacctctccttcgaaatgggccgtgattcatctttatttttgtagggctgtgtcacgttagaaccactacagcaaaagttttcattggaaatctaataatgtttttttagtctgccatctggagtctgtgctccttgtatgtctttattgttcaagactaagagtggtgtgtgtgtctgtgttggggggatggggtttggtaattttgctaacatggctctaagaatctgtcccgcttcccaaaacctcatttttctctgctttagcagtagcccaacactgaaaacagggtactgcttttttagaggagttctgatttggattccttttctttctttttttttaggccaaaattttcatttataaatagcttctgtggtacacaacatgcaaatatttttggtttcatgatattacaccagagttgcagagttgtagctgttttttttttttttttttttgaggcagtctcgctgtgtcacccaggctggagagcagtggtgcgatcttggctcactgtaacctccacctcccgggttcaagcaattctcttgtctcagcctcctgagtagctgggattacaggcgcccacaccacacctggctaatttttgtgtttttagtagagacggggtttcaccatgttggccaggctggtctcgaactcctgacctcaagtgatctgccctcctcctcagcctttcaaatgctgggaatacaggcatgagccaccacacccggctgaacttttattattttaaaaacatttttatttatagtaaaagtcacacataaaatgaaatttgctgtttttagaaagaatgtttaaaaagatgtgtaccatgttgcccagtacagtggctattcagaaacagccatagtacaccacagcctcaaactcctgggctaaagggatcctcaagcttcagcctcccaagtagctggggctacaggaacacaccaccacatctggcttgcctccttctccttctctttctccttttccttctccttctcctcctccttcttctttttttttttttgagacaagagtctcactctgtcacccaggctagagtgcagtggcatgatcttggctcactgcaatttctgcctcctgagttcaaagcaattctcctgcctcagcctcctaagcagctgggattacaggtgcataccaccatacctggctaatttttgtacttttagtagagacggggtttcaccatgttggccagtcccgaactcctgacgtccagtgatcctcctactgcggccttccagagtgcacaggcatgagccactgtgcctggcttgttttcttctttttttaaatttaatgagtttaggcagggtttctcagcctcaacagtgttagcattctgggctgaacccctctccgtggtggggactgccctgtacattacaggaagcttagtagcatccctggcctccactcaataccagtagcaaccccaagtcatgacaaccaaaaatgtctccggatactgccaagtgctgggatcacaggcatgtgccaccatgcccagctgatttatttttattttattatttttgagacagtctcgctctgtcgcccaggctggagtgcactggcacgatctcagctcactgcaacctctgcctcccgggttcaagtgattctcctgcctcagcctcccaagtagctgggattataggtgcacgccactatgcctggcaaagttttgtatttttgtagagacggggtttcaccatgttggcaggctggtctcgaactcctgacctccagtgatccacccgcctgggcaatatagcaagaccccatctctaccaaaaatttaaaaaaatttagccgggggtggcggcatgttcttgtagttctggctactcacgaggctaaagtgggaggatcatttgagcccaggagttggaggctgcagtgagctacgatcacaccactgcactccagcctggacaacagggcaaggcctcatctcttaaaaaaaaaaaaaaaaacaaaataaaataaaaagtgaataagtgaaagtaataaaatgtaagatacagttggagttctctttgtcatcttcccttgctatattctcctcccttcttcccagaggtaacaactctcttaggtttggtacataaacttccagccctgcatgtattttgacacataaccttgtacacacgtcaatgccagatacaggttcagtatcccttattcaaaatgcttgggaccagaagtgtttcccacttgggattttagaatatgtgcgtatatgtaatgagatactgtggggctgagaacgaggtctaaacgttaaattcatttatgtttcatgtacatcttatacacatagcctggaggtaattgtatacaatattttcagtaatattgtgcgggaaacaaggttttcaccgccctgactgtgacctgtcacaagaggtcaggaatggaattttcttccactgctatcatgtcggcgctcaaaaagttgaattttggagcatttaggattttggattttcgggccaggaaattttggagcatttaagattttggattttgggttatcttcagttgttctttaaatctatttatttatttatttgtatttgacaacgagtttcactcttgtcaccctggctggagtgcaatggcgcaatcttggcttactgcaacctccgccttgcctcaagcaattctgctctctagtggctcagattacaggtgtgcaccaccacgcctggctaatttatgtatttttgtagagatggggtttcaccatgttggcctggctggtctcaaactcccgacttcaggtaatccacctgcctcagcctcccaaagtgctgggattacaggcatgagccaccacgcctggcataaatctttctttaaatctttcgctgctgtaataaaatatacatcataaaatttgccatcttatttatttttcagtatacagttcactggtgttaaacactgccatttatattgtaatacacttttgagtattctaaatatctgcatatattgggaagctaagtagtactatcccttaggaagccattgtgtattttgcacgtaaagcacatttcagttctgactggccacacgtggctggtcctgctgtaatggatctagtctttaaaaatactccgcgagagcttgcagtgagctgagatggcgccactgcactccagcctgggcgacagagtgagactccgtctcaaaaaaaaccaaaaaacaaaaaactctgcgatcttcctcaccatgcacacatatgatatttttgtgattgtgattccaattgctacacctgctgcatgagttcttaagccaaatgcttttttttttcctctcagccactatgttctttaagtttatgcctcttgattcagtattgctagttcattcttttaagtgctacatagtatcttgtatgaataagccacatgctactcaccagctcccctagtgggaggcattgagattgtttccggtttgtttcttttataaacaatgctgcaatgaacatcttggtgtccatctcctcctacccatttgtgaatggttttctaggattgatgttcagaattgaagtcacagggaatggagtatgtgcatttttagatctagtatatactccccgaatggtctccaaggtggctgtgacagtttcaccagtgatgcattaaggtatatgtcaaatgtgggcaaggctgcaggaaaattatgttaattccagtgcatggaaattggtatcctatggtattcttttgcatctccctgattcctggtaagactgggaatctctctgtatgcttcttagccatgtcttcctacctcttcctcctctttccctgggagctgttttggggtgggggggctgggcctttttcttcagggactctgcattggcaacgtcacaaagaggtgcacaagggattgaagtgtcggaaatgctttgctgctgtcattgcatttctttacccagcatttcaattgtgctttgctttgcttttctcacttgaaattgtggccagatagaaacccagttagactaataagcatccatctttttaaatctctttgagatgctgatgtttggatatcttcagttgctcttctttaaatctgtaattttttttttgtagtaataataggacatgcatcataaaattgaccatcttaaccttttttttttttttttttttttttgagaattcatctgttgatggacatttgggttgtttccgccttctggccattgtaactaacgctgggaaaaacacgggtctacaaatatctgtttgtggctgcccaagttttggggacacatagtggaagcccaccccttcctgattgaagcatggggcccattgagagacttagcccataggagcctctttccagtgaggaatatggagggaatggagggcagtacaaaagttctccggcctggacccttgtgattctttgaaggctgagacgagagatgagactcatggctgggttcactttttggttcactttccctttccttttttttttttttttttttttgagatggagcactctgttgcccaggctggagtgcaatggcgtgatctcagctcattgcaacctctacctcctgggttcaagtgattctcctgcctcagcctctcgggtagctggaattacaggtgcatgccaccacgcccggctaatttttgtattttttagtagagatggggtttcaccatgttggccaggctggtcttgaactcatgacctcaagtgatctacgcacctcagcctctcaaagtactgggattacaggcgtgagccactgagcctggcctctttttccattttctgttgcatcaatggaaagtccatctcctgcccgtggacgttttctatgttgatgtggaatgtggcatttgtccaggaacttggtgctttttttttccctctattatttcatttgcttttggattttgagagatggagaacttccttagtgtgggagggaaacagttatggatttactttatgattctacattcaatcctggtctcttcaaatgatttcagggcttgtttggccaggtcaagtctgttctaggaggattttctttccatccttcctctgggaaatgaatgagtataaaaacatgcccaagatggagggaaacctccccttcccttttttgcctttttcttcctggttttgtacataactgaacattttgattttgggatgagaggatattagttcattctcacattgctataaagaactatctgagactgggtattttttaaatttttaaaaatttaatttaatttaatttaatttaattttatttatttatttttttgagatggagtctcgctctgtcacccaggctggagtccagtggcgccatcttcgctcactgtaagctccacctcccgggtttacgccattctcctgcctcagcctcccgagttgctgggactacaggcacccgccaccatgcctggctaattttttgtatttttaaatagagacgggatttcaccatgctagccaggatggtctcgatctcctgacctcatgatccacccgcctcggccttccaaagtgctgggattacaggcgtgagccaccacgcccagcctatttatttatttttttgagacagagtctccctgtgttgcccaggttggagtgcagtggcatggtctctgctcactgcaacctccacctccccggttcaagcgattcttctgcctcagcctcctgagtagctgggattacaggtgcctgccaccacgcccggctaatttttatagttttagtagagacggggtttcaccatattggccaggctggtctggaactcctgacctcgtgatccacctgccttggcctcctaatgtgctgggattacaggcgtgagccaccgcgtctggcctgtttttttgtttatttccataggttttgggggaacaggtggtatttggttatatgagtaaattatttcgtggtgatttgtaagttttggtggatccatcacccgagcagtatacactgaacccaatttgtagtcttttatccctcactcacttcctatcctttccccctgagtccccaaagtctattgtatctttttttttttttttttgagacagagtctcacgctgtcacccaggctggagtgcagtggcgcgatctcggctcactgcaagctctgtctcctgggttcatgccattctccttcctcagcctcccgagtagctgggactacaggcgcctgccaccatgcctggctaatttttttgtatttttagtagagacagggtttcaccgtgttagccaggatggtctcgatctcctgacctcatgatccgcccgcctcggcctcccaaagtgttgagattacaggcatgagccaccgtgccgggccttgtatcattcttaagactttgcatcctcataggttagctcccacttatgagtgaaaacatagatgtttggttttccattcctgatttacttcacttaggataagagtgagactaagtaatttataaagcgctgggattagaggcgtgagccatggtgcctggccaatgtctggcatcttttctttggtgtaatgttttgagattcatccatggttttgcatttatcaatagcgtatttcttttgtgttgttcagtagcattccattgtgtggagagacgacatttagtttcaccattttagctgttgagagacatttgggttgttttcaacttttggctattattcataaacctgcatgaacctgttatacacaattgtgtaggagtcttttatgtggaccaatgccttcatatctcttgaggttatatcctggagcagaatggatgagttgtgtagtagaagtgtgtataaggagtgggcaggccaggtgcggtggctcatgcttgtaatcctagcactttgggaggctgaggcgggtggatcacttgaggtcagcagttcaagaccagcctggccaacgtggtgaaaccccgtctctactcaaaatacaaaaattagccgggtgtggtggtgggcacctataatccaagctatggtgggagaattgcttgaatccagcaggtggaggttgcagtgagctgagatcgcaccactgcactccagcctgggtaacaaagcaagactctgtctttaaaaaaaaaaaaaaaaaaaggaaaggccagattgttttcctaagtggttggagtctgttatatttccaccagcaatgtatgagagttctaattgctccacatccttagcagcacttaatatttattgtcaatctttattattattattgttattattatttttagagataggatcttactctgttgcccaggctggagttcactgcagccctgaactcctgggctcaagtaatcctcccacctcggcctcctgagtagcttggattacaagcacacatcactacacccagctaattttatttttgtaaagatgaggtctcactaccttgcccaggctggtcttgaacccctgggatctcaagcaatctccctcctcatccttccaaagtgttggattacaggcgagagctgcagcgcctggcccctttcactttcttaacagtatctttgaaaagcagctgatttttcacagggtgttgtaattaatttaattagctccacactgtggctttgaaaatcttccgtaagctctagcgccagacacatggatatttgcagaatcttattttctagagtcctggaaattttctttcctgtgagagagttgagagcgataattttagggtggttattcatcttcagacacaaggagtaagaatgtagggagttcgtgactgtgtttggagaggggagagcatagcagtggtctaatgatcttctcagggttctcaaagggtggacgagctgcaggttgaaacttgccttgcttttagactgttgactgagtttgtagttaagcagataagtgccaaaggagaagtcagggctgactgattgcaagtgatgattgaatactggccctcacaaccatctgtgaaaagtctatttccagaaattttttttattttgttattattattattattattttttgagacggagtctttctctgtcgcccagtctggagtgcagtgatgcaatttcagctcactgcaagctccgcctcccgggttcacgccattctcctgcctcagcctcccaagtagctgggactacaggtgccctccaccacacctggctaattttttgtatttttcgtagagatggggtttcatcatgttagtcaggatggtgtcgatctcctgacctcgtgtccacccgcctcggcctcccaaagtgttgggattacaggcatgagccactgcgccgggcccagaaatatttttaagaagagatttttgaaaaacccttgttttcatgatgggaggatatgaaaagcagtgttttgaaatctcctccttagatcctgatactcggaactgtcgattctcccattttcattttctcctggatagattgtacacttgtgccttggtatcttcaatgattccaaaacccccctggggatccagtccctgacataaaatggcgtagtgtttgtacataacctacatacatcctcctgtatactttaaatcatcttggtctggcagtgtggctcacacttgtaatcccagcacattgggaagcagaggtgggaggattacttgagcccaggacttcaagaccagcctgggcaacatggcgagacccccatctctacaaaaaatttaaaaattaattgggtgtagtggcatgtgcctgtagtcccagctactcaggaggctgagacgggaagattgcttgagccagggagttccaggctgcagtgagttatgatcgcaccactacactccagcctgggcaacaaagaaagaccccatttccatttaaaataataggggccagatgcagtgactgatgcctgtaatcccagccctttgggagcctgaggtgggcggatcatcacttgaggtcaggagtttgagaccagcctgcccaacatagtgaaaccccatctctactaaaaataaaaaaaattagctggacaccatagcgcgcctgtggtcccagctactagggaggctgaggcaggagaatcacttgaacctgggaggtggaggttgcagtgagccgagattgcgccactgcaccactccagcctgtgtgacagaatgtgacagaatgcgggcacatcacgagatcaggagatcgagaccatcctggcgaacatggtgaaaccctgtctctactaaaaatacaaaaaaattagccgggtgtggtggcgggcgcctgtagtcccagctgctcaggaggctgaggcaggagaatggcgtgaacccagggggcggagcttgcagtgagcggagatcgtgccactgcactccagcctgggcaacacagcgagactgcgtctcaaaaaaaaaaaaaaaaaaaaaaaaagacagaaaaagaaaaaacaaaagacgtttagctttcctgggtgacccagtgttgcagggattggccatccttggtataaggcataggatgtgcagggtagcaggacagcagagtgggcagtgtgtggggtttctttcattgatagggtggttcccagcactcggggtcagggcttgcttgtagaagtttctgaaaagttgcagtcatgtttcatttctttctccccctacctagcacatgccaggccacacagcatagtacgatggtttggaaccaggcttaacctgttagtagccgtggggctctgggcaagtccactggagttctccgggatctgtttcctcttttgtaaaatgggaaccaaaaggtatcacaggctgggcatggtggctcacgcctgtaatcccagcactttgggaggctgaggtgggtggatcacctgaggtcaggagtccaagaccagcctggccaacatggtgaaaccccgtctctattaaaaatacaaaaattagccaggtgtggtggctggtgcctgtaatcccagctactcaggaggctgaggcaggagaatcacttgaacccaggaagcggaggttgcagtgagccgagatggcgaggtggcgccactgcactttagcctgggtgacagagggagactgtctcaaaaaatcaacaccaaaaccaaacccaacatgtatcacaagctcgttgtgaggatcagagaagaggatacgggaatgataaacatggtagttacattgttgctagcattgtagttatattgcagctgtacattgtgacctattgtagctactgttatttctttgattaagtttagcaactgaaattttttttttttgagacggagtcttgcactgttgcccaggctggagtgcagtggcgggatctcggctcactgcaagctccgcctcccgggttcacgccattctcctgcctcagcctcccaagtagctgggactacaggcgcctgccaccacgcctggctgattttttgtagtttaagtagagacagggtttcatcttgttagccaggatggtctcgatctcctgacctcgtgatccaccctcagcctcccaaagtgctgagattacaggtgcgagccactgggcccggccaacaactgaaatatttaacatacaataaaatgcacatggccggggtgcagtggctcacgcctgtcatcccaacactttgacaggctgaggcaggcagatcacttgaggtcgggaatttgaaaccagcctggccaactactaaaaatacaaaaattagccagacgtgatggtgcgttcctgtaatcccagctactcaggaggctgaggcaggagaatcgcttaaacccaggaggcggaggttgcagtgagccaagatcaggccattgtactccagccggggtgacagaaggagactctgtctcaaaataaataaaataaaataaaatgcacagatctgaagcattgagttcaatgaattttgacaaaaaatatatgcacctgtgtaaccaccactgaaaacaaaatggaggacattgcctcatcccagccctttccagtgaattcccagtacccccgggaatgaggtgttacaatgattactatcaccattgttgattattattgtttagtttggttttattgaagaagcgggtagagaaagaaatagttagcctcatgcaaaaagtagggcatatgagagcctgagatatggcttaagaagagtattgtttgagaagtttggctgagtgtggtggcttatgcctgtaatcccagcacttcgggaggctgaggtgggagaattgcttgagctcaggagttcaagaatagcctgggcaacatagtgagactctgtctctataattaaaaaaaaaaaaagagacagaaaagtttaaggtatgttggcaggtagtcctagatggggtttactgccaggagcagttaggattcaaagagcaaaaatttgagggtaaaaggatgtatggcaggttgttggtggtggatatatagccccaacatccagtcactttaaactcttatcaagacaacacagggccgggtgccgtggctcatgtctgtaatcccagcacaatgggaggccaaggtgggcagataactggtggtcagcagttcgagaccagcctgaccaacatggtgaaaccctgtctctactaaaaatacaaaaattagcagggcgtggtgttggggacctgtaatcccagctactcaggaggctgaggcaggacaatcacttgaacctgggagatggaggttgcagagagcagagatcacaccaccgcactagagcctgggcgaaagagagagactccatctcaaaaaaaaaaaaaaaaaaaaaaacaaaaaacaccaccaaaaacaagacaacacaaagcgtttgaacgaaaacagcatttgcagatgcaaattcaggatccgaaattaattcttcccccctctttgctgagctgccagaatgttccaaggagatccctcctttccagtttcctccgtggcgcacaggctgtgccgagtaagtgggcaattgtgagtttctggaaatcagcgagctggtgtggctcctggctcctggctctggccaagggagttggcttccctgtgtccatgccaggaggggaggctggaggcttctaaaggccgcagctccgctgtagacacgcgcctccttggcactggctttgttgaaatctgtccctagatagtctctcttctgcacagacctctgaggtttttccatactgcaaagggccttgctgcaggaggaacagtctgacctaatctctcctagaggaggccttgagctaatattttttattttttttttatttttgagatggagtctcactgtcacccaggctggagtgcagtggtgcaatctcagtccactgcaatctccgcctctcggattcaagcgattctccctgcctcagcctcccaagtagctgggattgcagatgcccgccaccacacccggctaatttttgtatttttagtcgagatggggtttcaccatgttggccaggctggtctcgaactcctgacctcaggtgatccacctgccttggcctcccaaagtgctgggatgacaggcatgaagcacctcacccagccaaggtaatatttctgaaaggtggagtaccatgctatgagctagacacttggtgtggtttatcctgtcatcgcctcagtgacctcaccaggtggacactgttaggattcctaatttgcagagggagaagttgaggctgacagaaaggtcagcactgtgctcaaagtgatccagctgctaccaagatgaactgcaggctttgctctgagctcacagcctgacctcagtctagagctgggaatctttctctccctcattgctacacctgatcaattactgagtcccatccctttaactgcttacatggccttcaaatccatcttccctacctaagctgcccattcattgacctgtgccttctgtccatctgctgagagccaggtgctgtgcgagcctctgagaatgtggccgagaacaatatggataaaagttctgagccgggtacgctgactcatgtctgtaaacccagtgttttgggaggttgaggcagaagacttccttgaagccaggagtttgaggccggcctggacaacacagcaagaccccatctttacaaaaacaaaaacaaacaaacaaaaaaaagaaaaagaaaaattagctgagcatggtggcactgacttgtggtctcagctacttgggaggctgaggtgggagcatcacttgactccaggagttcgaggctgcagtgagccatgactgtgccactgcactccagcctgggcaatagagcaagaccctgtctcaaaaaaaaaaaaaaaaaaaaaaagactgtaaatgtatcctccagagtaattcttctttttcatttttcaaaagcatccttgctttgtttatgcttccaaaagtttaaaaactgtagctaagttccaagaaagaaaaagggaagcaaaggaaaaggaaaacacagacccagaggccctttatggggttgattgtatgtgaagtccataaattgatggagagaaggagcaccttggcagtatttacttgtactctcctatgtcatggatttcctctccattttcccaagggttctttcctgttcttagaaatgttttgtgattttgcttcagacacagtttgtctacttcttgtaagcattgttcttagattgctggctttatatctatcactcccttgctcatctgcccatccatctatccatccatccatccatccatccatccatccatctatccatccatccatccatccatccatccatcatccctccatccacttgctcatctgcccatccatccatccatctatccattcatccagtccattcaccacccaccatctattatccatccatccatccatccattcatccactcacccattcatccatcatccatccactcacccatccattcattcagtcacccttcatccattcactcacccatccatccatccactcatccaatcacccatccatccatacatccactcatccattcatccatccatacatccactcatccattcatccatccatccacccacccagacgtccatccatccatccatccatccatccttctgtctactctgccaacaatccacacacctgtccctccatcccttccaaccactcacccagcaatcttctcatccatctatccacccatgcatacatccacttattcattcatccatccctccacccacccattcatccacccatccatgtgtccattcatctctccatctatccgtgtgtctatcatctaatataagggagatgttttgaagtattaaaagtgattattttgtagcataggggacagggattgtgttttctttacttactgctaccttattaaatgcttactagttctaaaagccctgcaattgattcccttcaattttccaactctataattgcagcatctgcagataatgatgacttcttgccttttgccaataattagaccagttattgctgttaaccttgttatggcaggaacttccagaacagtgttcagtgacgcagctgaatatggtcagcccagtctcatttctgatttgagtggaatgcctcaattgttttactgcagaggataattatataattgttaatactcttgaccttcctgtctttagcctcactgagtaaatggggtgtgatcatgaaatcttgattgtctcatagatgcaagagacataaacgacatttgtctgtgtataatgacagcagatttattttgctaagctgttaagctgttaaaataagcctttaagcccccgcctcaattttccagcagagtggaatgttattttgttgcttctggccaagtgtcgatattcattttagggcaggtcttcatggaaagtctgctggactataggtctggatacttgccggaccctgtgtcatcactaaagttagggtgcgtttcagaaccaccctgtaccacagtgaagagggacaaatggccttagggagcaggacccatgggggccctctggggctgtttcttgtgccctgagagaggccctagatttgggacagtctgatttacctcccctcccttttttttttctgggtgatgctaccctggtttctgtgttgaaatatgaccctagtgtgaaggtcgcggtctcagaccatcttgtttctggtatgttaagaaacagaaaaacaccttttaggacacaatgttaaccattgaggatacatatcagtgttctggaaaaacaaaaacaaaaacaaaacaatctgtaccgcgactgtggttttcatcagggtgggctgcctttccgatccataaccctgtgtggcttgatggagaacatgttttgtaacttgcaagggcatctgcaatagccgggtcctcttggtgaaaggggaggacccacattaggtctaagctggctggagtcgatgcaaaactctcacatgctttggaaaaagcacgtgatctttcgacgagaatgcaaatgttgaccgggtgcagtggctcatgcctgtatttgcagcatttggggagactgaggcaagcggatcgcttgagtccagaagtttgagaccagcctgggcaacttggtgaaaccccatctctacaaaaaatacaaaaattaaccaggtgtggtagtgcatgcctgtagtcccagctacttgagaggctgagttgagaggattgcttgagctcaggaggttgaggctgcggtgagctgtgatcacgccactgcactccagcctgggcaacagagccagaccctgtctttaaaaaaaaaaaaagaatgcaaatgtttgcttgattattcagctggtatttgacacacagttctttgttccagagggactgtccagcaacaaatagtgaattcgttaatttttcacaccaaacctattgaaaataaccagaaaaggtatatgctggaaaactcagtgttctagaaacattcatgtttgccatcccaagagcaaaagtcatggaatgcctgatgcttagtgttaagaggaaggaattccacacagcctgtggctagcttttcttatttcattggtgtccaagacaagatttgaactgtttactaaaggaaattagcatcataagtctcctctggcatatatttccagcatccaagtggagctgctgagatcttgctcaagagtagcaaaattggcaggaggaggagggcattagtttttacatcagcttaaagaattttttttatcagccatttttgcaatttggaaacctgtttggagtaggggtatatggagatgaaattgggctgtttctaggattcacctcctccttcaggcattttttttttttttttggaaacagggtctggctctgttgcccaggctggtgtgcagtggcgtgatcatggcttactgtagccttgacctcttgggctcaagcaatcctcccacttcagcttcccgagtagctgggaccacaggtgtacaccatcgcacctggctaatttttatatattttttgtagagatggggtctcactatgttgccagggatggtcttgacctctcaggctcaagcaactctcctgcctcggcctcccaaattgctgggattacaggcaggagccactgcagttggtacttagagttgttttttttttttttttttttcccttgagacggagtctcactctgttgccaggctggagtgcagtggtgcgatcttggctcactgcaacctccacctcctaggttcaaaccattctcctgcctcagcctcctgagtagctgggactacaggcacacgccaccatgcccagctaatttttttttgtatttttagtagagatgtggtttcaccatgttggccaggatggtctcgatctcttgacctcgtgatcctcccacctcggcctcccaaagtgctgggattacaggcgtgaggcaccacactaggccgatcctcagacatttttaattttccttttttagtgttacagccagccatttgaaaaatgagacttccccctaaccttgtgtcaaactcagagacgttgtcatcttggctttgatgtggtggaggagaggggcttctcattccgggacggggtttctccacctggggcctgcggatactggggctggattgttctctggggtggggccgtcctgggcactgagggtgctagcagcatccctggcttccacccattccatgcctggagcgccgcccccgaggcatggcaaacacaaatgtctccagacactgccaggtgtctcctggtgggcagaatcgcctccatttgaggacccctggaccagggtgctggaatgggggtgaggggcactctgcaattattctctgctctttttttgaggggggggaaatggaaaccaagagcccatcatcagcctcgtggctctgtggtttgacactgccatgctaccgacaaaaaccacgtccctagacttgggggaccaaggaatctggaggaatatgatgatagtcatttaatgaaggtgggtttatgtattactcaagtgctgggctggggagtcaggacatagccacagggaagaaaacagaaaggtccttccctcttggaagcccctcttgaaacacctaattggtgacatggtacactggagaatcagagagtgtcactcaagcattttggcttggtggtggggcgggggtggcgggtcaggcactcaagcacccctaagctgatctggagaaagtgtcggggaaggggaacattagcgtttctccctgaggaatcatcttacacctataacggcaactggcccacagtaacattgatggagcaagtgtcttcttgtggctcggccgctcaatagctgtgtgaccatgggcaggttactgaacctctctgtgcctcagtcttctcctctgtaaaatgggaacatctaggattgttgggggaaataaatggttaataattggaatagtgctgggtgcataggaaactctaagtgttacacagcatgtggccacaacctcccctctcccctcctctctcctctttgctgctgccctgctgccttaatgggatactcccctctctgtctctgtctgtctgtctgtctgtctgtctctctctcatccccttttctttcctctgttcccccacccccacctctgatgcagtttggaccaagttttcttcagccagctaatttagagacaagaacctggatatttattgggcgtttgggggacttccttacagccctaggtctctgtgaaaagggccctggattatctctgcaaaagcccacctgctattggttagccaggactgtctccactttcagacaccagcttcatccaaacactctttgctgtatttataaccacggtgcatttcctcgggacgcacatcttacggcttcttggccccttcgcccagggtgcactgcctggaccatcgccctccggcagagacagtgtctttctttgtatgttctccttcctctggtcgagatgtggcttggtcacctggagtggggccgtcggcaagtcgcctgggcttcgtggaggctcgctgcccccatggcggaaagctcggccacacaccctgatgtctcgacacctttgagttgcccatgaatgggttttcagagcttcccgtgtttacttcgctgcacgcctctgtttgtgctctggggaaattcttggcagaggaaaagccaattggaaaacagccctgcttggtgtcagggcttgaggttgagggagaaagactgaaacggagatttgcatgagctggtttgagcatgtcacaagactttgtctttaaaaaaaaaaaaaaaaaaattggcctggtgtggtagctcactcctgtaatcccagcactttgggaggctgaggcaggcggatcacgaggtcaagagatcgagaccatcctggccaacgtggtgaaaccccgtctctactaaaaatacaaaaattagctgggtgtggtggtgtacgcctgtagtcccagctactggaggctgaggtgggagaacggcttgaacccaagagggagaggttgcagtgagccgagatcatgccactgcactccagcctgggtggcagagcgagactggtctcaaaaaaaaaaaaaatttttttttgttccagtctattctggtggcttagaggagggaagatgggaaattttgggtttaatagagtaatatccatcaggttgagggctttgaagcacctgggaatatccataagtcactactgagcaccagctgtatagagttattgagcatgtattgtctcccaggcacatggtcctcacaacaatcttttcacagagctaggatttgaacccacagtctctctggcttcagaaccctagcttttcttgctatactctgccttacagaggaagggaacttttgtactgggttttgaagggtgaataggagttcaatgaagaagcagcacattctgtgctaaatttggcttcctgatcctcctagaattggccagaagccaatatctggaggccaaaattgggtcactagggtgaccaactcatcacagggccctggattatctctgcaaaagcccacctgctactggttagccaggaccatcacagtgtgcccaggtaaccctgcgtttcaccccaaagcagaattttacaccagagcctggacaccagttgaattttctttaactcatttctgtcaatggttacctccaaaaatgctcccttgtgtctttatgctgggcttctttctctagatacttccatttcttggtttgggtgaaaatcaaatgaggtaattaatgcttgtgacatgtaaagtgtagtgagtggcacatggtaacctctttagttttagccagttggttttttttgtttgtttgtctttgagacagagtctcactctgtcacccacgctggagtgcagtggcgcagtctcagctcactgcaacctctgcctcccaggttcaagcaattctcctgcctcagcctcccgagtagctgggattacaggtgcacgccaccacactgggctaatttttgtattgttagtagagatggtgttttgccatgctggccaggctggtctcaaactcctgacctcaggtgatccgccctccttagtctcccaaagtgctggcattacaggcatgagccacagtgcccagacagttttagccagtttttcactggcctccctctttgccttttttgcaagggagctggcctccctgtccctggagtaagcaaacttccttatacctatagcttcctctaaggaagcgtagttacctacagcctggccctccccaaggacacagctgtttcctccaccaagagcaaggagtggacataatcactgccaaatagggaagccaggctggacaccgtggctcatgcctgtaatcccagcactttgggaggccgaggtgggaggatcacttgaggccagggattcaagaccaacctgggcaatgtagcaagaccctgtctctaaacaaataaaaaaattagccagctgtggtggcccatggctgtagtcccagctactccagaggctgaagcaggaggattgcttgaccgcaggagtttgatgctgcagtgagctacggtcacaccactgaacaccagccaggacaacagagcaagaccctgtctcttaaaaaaacaaaaaaataaggaagccagatgggtgctgggtgtacgggacacatgtcaaaagtcagacctctatctgagtaaggaaacaggttcagagtcaggattaaagaccaagacagcttgaggtcatcagaggccaggaatttccatacaggctgcggtccaaagtgccaagctgggctagatagatgttggggaagagtctctgtcgccctctttccttccccgttaatgctatcagctgagcatgggtcactcctgattttttttttttttttttttaccgaggacataggctcagagtgtcttctagctttcaacccaccccagactctgacttagcctttcccaaatggtgctgtgcagaaaaatgaaaaaattgctaggaggatcatgtgcctggtggatagtacatgcttgatagctgtaaacagttggtgctcaatatatcgtggcttgtggatcttcccagctgcttcagaaccccaagcctgctgtataattgtacttgatcccgacaacagccctgccagatgggtgttactctgattcctgtgtcctggtaagtggacggggggcctggagtagctgaattgcctagagaaggggacatagctagaaaggaaaagttgaaacccagtgtgatgccagagtccatgcaaactttatcctgaaaggagggatctctttttttttttttctgagatggaatctcactctgtagcccaggctggagtgcagtggtgtgatctcggctcactgcaacctccgcctctcaggttcaagcgattctcctgcctcagcgtcccaagtagctgggattacagacgtgtgccaccacaaccggctcatttttgtgtttttagtagggacggggtttcgccgtgctggccaggctggtctcgaactcctgacctcaggtgatccgcccgcctcggcctcccaaagtgctgggattacaggcgtggccactgcgcccagccttcttcttcttcttcttctttcctcctcctcctcctcctcctcctccttttttttgacagagtctcactctattgcccaggctcgagtgcagtggcacaatctcagctcactgcaacctctgcctcctgggttcaagagattctcccacttcagcctcccgagtagctgggattacaggtgcgcaacaccacagccggttaatttttgtgtttttggtagaaacggggtctcgccacgttggccaggttagtctcaaactcctcacctcaagtgatccgcccgcctcagcctcccaaagtgctgggattacaggcgtgagccactgcgctcggcctggtgaagaccttcttgccggtggggactctgcagagtcctgacagggagcagggcatcacatggcgagggagctgagagtgtcagctcaggtctctcttcctcttcttataaaaccaccagtcccactcctatgataaaccattaatccatgaatggattaatccacttatgaggacacagcccttttaatcacctctgaaaggccccacctctcaatgctgccacatgaggaattacatttcaacatgagttttggaggggacaaatattcaaatcatactattatgttaccagtaaaatttaaaatataggaataataattgccgatgtgtggcagacttaccaaatactagaccctgtgctaagtgttttatatctattattttatttaattttcttggtcactgcataacatatgctctgttagtcccagtttttcgaatgggcataacaagaccgaacctacctagagttggcacaagttgtaaaaataggatccgtggccgggcacagtggctcacacttgtaattccagcactttaggaggccaaggcgggaggatcacctgaggtcaggagttcgagaccagcctggccaacatggcgaaaccccgtctctacttaaaatacaaaaattagccaggcgtggtggcgcgcctgtagccccagctcctcgggaaactgaggcaggagactcgtttgaacccgggaggcggaggttgcagtgagccaagatcgcaccactgcactccaggctgggcgacagagcgagactccatctcaaaaataaaataaaacaaaaaaataggattcacttttgccaccaacttgaaaaggaggcaaacacaagattactcatctctggagaggaggcattcagatttgcctactcagcattcctggagatagaaccagattttgcatgggttagaatcatattttgcttgggaagccactcagacctcattgtgtggactctattcccagagccagcttcctttattccttcagactcttatgattggctcaggggaaggcacatgactcagactgggccaatcagctttcttaattcctccagcctccatgattggttcaggggtgggcatgtgaccccagaaggttccataagattcagttctgggactttagtgggagtgatagagagatttttccttgctaaatcttccttgctgtgaagctataatccaggtgccaccatgtagagaccacgtgtctcagacttctgacaccatagaaggaagcaggactgcgaaaaggaaagggagagagatggggtccccatgacatcatttgacacctggatctagctgtacctgaaagtgtccttgtcctatgacttgttagttaaatgagccagcaatcgttcttttcttttttttcattttctttctttcccttccttccctccttccctccttcctttcctttcttttcctttccctccctccttccctccctcccttccttccttctctctctcttccctcccttccttccttccttctctctcccccttccctccctccctcccttccttccttccttctttccttcgttccctccctccctccttccttccttccctccctcccttttctctctctctctctcttctttctctctgtataactgagctttctattctcacaaactgaaagaggtcttgctaatccaaggcatgacaatcagagcaacatgtgaagcccaaagagctgcagagctcccctccatggcttccagccccgggggtggtcagtgaaagtaactggagcccggagcttcagaggccagtgtggaggttggaaaggttgtggtcaggagagagtaatatatctggtccctgcaacagacacccctgcagttttatcctgaatcctgggtaatttccccaggtcctgggaagcctaataaagcccctactcagatgttggattgcaagtcctttttgtttgtttgttttttaaatccactttaaatatgtctgaaaaccacacacagagtgactgctgcacagaagagcgaatggttcatgccttcttctttgctgccaccaacaagtcagttacctacttctctgacatgggacccttggctggagctcactggctgccttcctgccacctgtaagcctcggcacttgctgttccctctacctacatgcttttccctgtgatacttcctcatacgatttcctcagattatctttgctcaaacaacaggcaagggctgggccttaatctcacacctgtaatctcagcactttgggaggccaaggcaggtggatcacctggggtcaggagttggagaccagcctggccaacatggcgaaaccccatctgtacaaaaaatatacaaaaaattaaccagatgtggcagcgggtgcctctgatcccagggacttgggtggctgaggcaggagaatcacttaaacccaggaggcagaggttgcagtgagccgagatcatgccactgcactccagcctgggcaacagagcgagacttcgtttcataaaaacaaagaaacaaacaaacagaaaaaaacaacaaaacaaacaaacagaaaaaaccaacaaaacaaaaaacaagaggcaagaagttcagtgtgcagaatctctgagaaaaacccatggttgttaaccccaggtctgccccttttgagcagggtgacattaggcaactgatttgatttctcttagatgaaatttcctcactccctgcctattcaaccacagtactgaggacatttggagctggattatctctctggtggcagctgtcctgggcattttagggtgtttactagcatccctggcctccccccactagataccagtagcactcccaccccacactggttgcaacaaccagaaatgtctccaagacacttccacgtgacccccggggggtcagaatttctccccttccccctgtgttttcctatggaggtggaacgtgtttatttctttgctcaccgttttgcaatctctcttcccccgccacaaggcagggactcttctatctccgtcaccatcccatcctcccacagtggagacagctctggggactctcctgagcagcagattcttgggtgccacattctgttccattcctggggaatttatctctttactgagtgatgggtacatgagaactttctgtgtcacccttgcatcttttctgttttgtttttacaaaagaaaaaaaagaaggccgggtgcggtggcttacgcctgtaatcccagcactttgggaggccaaggcgggtggatcacgaggtcaggagatcgagaccatcctggctaacacggtgaaaccccgtctctactaaaaatacaaaaaattagccaggtgtggtggcgggctcctgtagtcccacctacttgggaggctgaggcaggagaatggcatgaacctgggaggcggagcttgcggtgagccaagatcgtgcccactgcactccagcctggcagacagagcgagactccgtctcaaaaaagaaaaaaagaaaaaagatatcactcgatgactgctaccgaaacattctgtggctgggagaggaaaataccagaaagggtgaatgtggtcggttgaatgatgcctctcccttcccccagagatgcccacatcgtaatccctgtcacctgtgaatttggtacctcacttggcacaaggctctttgcagatgtgattaagttgaggatcttgagacggggggatgatcctagattatctggtgcaccaaatgccatcgcagggatccttttcaaggaaagagggaggcaagagattgaaatgctacggccaagaaaaaggagctgccttaaaagctggattctctctggagcctccagaaggaaccaacctttgtaacatcttgattttagccctgtaagactcattttgggcttttcaccaccaaaactgtaagaaaataggcaggccatgatggttcatgcctgtaatgccagtactttgggaggccaaggtgggacgatttcttgaggctaggagtttgagaccagtgtgggcaacatagcaagaccccatctctacaaaaaaaaaaaaaagaagaagaagaagaagaaaaattagctgggcttggtggcacacatctatattcccagctacttgggaggttgaggtgggaggattgcttgagcccaggagttcgaggctgcagtgagccatgattgcaccattgcactccagcctaggcaacagagtaagatcccgatgcaggagaaaataataaatgtatgtcgttttacatttgtgggcgtttgtgacagcagcaatgggaaatggatacggtgagaaacccagcacctgggcctggaaaccccctctgggcgggtctctagccaggggccaacaggagtcagagcagggccttggtgagaggtggatacggggccccagcatcctgatggccttgctgtggcttctggggacacctgcagtggctccattacaccgtggcaatttgttccttcccagaccccctggatacaaggggcctgcattttcgaacccagagcccggggacatcccccgtggttccctgttaccctctggatgtctgtcctgctactatgcacctctccccaactcctggtacacagtgggagttcaggggccgtctcatttgtaccgcataacatcacggaggtccaagacgccatgtaatattctgtttaggatttcagaggcacagtcagttacatccatcttctttttgtctttgagacagagtcttgctctcttgcccaggctggagtgcaatggcacgatctcagctcactgcaacctctgcctcctgggtttaagcaattctcttgactcagcctcccaagtagctgggattacaggtgcacgccaccacacctggctaattttttgtacttttagtagagacggggtttcaccatgttggtcaggctgatctagaactcctgacctcaggtggtccactcaccttggcctcccaaagtgctgggattataggcgtgagccaccgtgcccagcctgcttccatcttcttagccacttttccctcaggtgagaccatgagattaggaacctgtttcaattcccgtcggaatttcccaacagagctggggctttgtgattcgaatatgttcagagaaggaagcagaaggaagcagaaatgaaggatgttatcagaaaaggagactcagggttgggtgtggtggctcacgcctgtaatcccagcactttgggaggccaaggtgagtggatcacctgaggtcaggagtttgagaccagccaggccaacatggtaaaaccctgtctctactaaaaattacaaaaattagccaggcgtggtggcatgcgcctgtaattcaagctactcgggagactgaggcaggagaatcacttgaacccgggaggcgaaggttgcagtgagccaagatcatgccactgcactccagcctgggtgacagagcaagactccatctcaaaaaaataaataaataaataaataaatacaggaaaaggaagctcggtagttttcaggggctgctggcgtttccaagctttaggcattttgctttgagtctttttctgtctttcgagtcatcctgaagtggaaccgagagaggactgagtgggtggagggggtggtggtggggacggctgtctgctctgctggaattgagagtctgggagatcattgtggtgtttttggagtgattcttaaccccagatatagacagtgacacaaggggcataaatacgaggaacagtgaccttccctggtgtccttgtttgaagcatttgaccatctgggcaaggcctgggagtgtctgaactggctggtgcttccatgaacaagcacagactcagagcccatggtcctgggttcgaatcctagttcttccacttctttgctgtatgacctttgtctacaaaaaataaaaatttagccaggcacagtggcgtgtgcctgtagccccagctactcgggaggctgaggcaggaagatccattgagcccaggggtcgaggctgtagtgagctatgattgcaccactgcactccagcctgggcaacagaagcagaccctgaagaaagaaagaagctgggaagacagggaagaaggaaggaagaaaggagggagggagaggggaaggaaggaaggaaaaaaaagggagggaacaaggaaggaaggaaggaggtggggacggagggaagaaggaaggaaggagggagggaaggaaggaaagggagggaggggagggaggagggagggagggaagaaaaaaagggaagggaaggaactttggaactactgaacatctctgtttcctcatctataaaaagagggataagtcatcatcatatcttcctctatggtcattgagtggatgaaataagacagcatttgcaaatcccctaatgcatacctggcccctgattttgttccttgggctgcagcgatgatagaggtttaaaacctccaaacgctgtgttgaaatctctcacgtggacaaccagcccaccagcagagaatgtcatttttccatcctgggtaaacagggtagagaagaatgaggacctcaggccaggttagagagacctcgcttggtgaccttgggaaggcttttaacttttaactttaatgctaacatctggttccctccagttaggcagtcggcggcctagccgtcttgtcttgaagtttctcttgccttccatcatgggtttatttgttcagcaaatgtttatggagggccagcacaggggggaataagaactagagttctgggaggacgtgtgaagaaacaagttccgagccccagggaggaaagaggtcattgcctccctctggggaaaatgtctcttctcatacctggttcacttcttaaatggaatttcccccttcagatgagtaaggcgtttaatcacaaagagaaaacaccttcatcacatagccatccttaaaaggcatttattgtgaagctggttcatagacttctcgcccaggttgctaacagccaacctgtctgggttttgggaagttaaagtgtctgtatcccatttcctttttttttttgagacaaagtcttgccctgtcacctagcctggagtgcaatggcacaatctctgctcactgaaacctctgcctcccgggttcaagcgattctcctgcctcagccctcccgcgtagctgagattgcaggcgtgcaccaccacgcctggctaattttttgtatctttactagagatggggtttcaccatgttggtcaggctggtctcgaactcctgacttcgtgactcaccagcctcagcctcccaaagggctgggatgacaggcgtgagccactgtgcccagccagttctgactttttaacttgtgatttgacttttcctgtctgaagtctttctctgctggacgtgagttgttgaaggtgttgcttttctttgtagacaattagaggcgctcatgcactgggctatggacaataatactttgaagatgtgcaaatgatttgcaacctttgttgcataaattatccctctgagatgctgtttggcttgataaataaaggacctgcaagagagaatttatcttgagcattccttgggggagagaagcaaaggggaagtgaatgctgcataataattctttgcatactttatggagggtgggttcctgcagtgccctgtagggttttttgtttgttttttttttttttttttgagatggagtcgctctgtagcccaggctggagtgcaatggtgcgatcttggctcactgcaacctccgcctcccgggttcaagcgattctcctgcctcagcctgccaagtagctgggactacagacgtgctccaccacgcccagctaatttttgtatttttagtagagacagggtttcaccgtgttagccaggatggtctcgatctcctgacctcgtgatccgcccacttcggcctcccaaagtgctgggattacaggcgtgagccaccgcgcccggccccctgtagtggtttaaagcatcttcactgttattctaagcctcacattttaaacagagctgaaaaaggactctaattgctggcctgggatccttgtgtgctgtaggaattcactgagggggcggggctggagagggctgctagagggtggtacagaagcagatggaactttctctctggctggacacagtagctcacacctgtaatcccagcactttgggaggctgaggttggtggatcacctgaggtcaggagttcgagaccagcctggccaacatggtgaagccccgtctttactaaaaatacaaaaaattagcaggacgtgggggtgggtgcctgtagtcccaactacttgggaggctgaggcaggagaatcgcttgaacccgggaggtagagcttgcagtgagccgagatcatgccattgcactccagcctgggcaacaagagtgaaactccatctcaaaaaaacccaaaaataaatttaaagaaaaattttctctctgattctgcctgcctgcctgctagactggaagcaccatgaggtcaaggtccacgatgtcttgtcgctattgaagcgcctccaaaacatggcagaccctcagcaaatcttggacagatgaatgggcattcgattcaacatgtgtctgctaggtgggagctgagcgggaatcgcagggcttgggtcccggggatgatggggaatggcagtgtgactgtggggaagccaggggaatggggtgctggagcccccaaagctataaatcagggcctgatgaacagacagacagatggaccaacttaaccatttcagccccatcggctttgatgatttccctctggctctggcaagagtctcgctcaccaagtggttctcaccctagggtgggtctggatatttctggggacatctgtggttgtcacacgtcggggtggggggagatgctcctgacatggagtgggtggaggccagggatactgctcagcaccctgcaatgtacaagacggcccctccccagatgaagatccgactctgaataccaccagtcctgaggctgagaaaccctactttaagataacagtgatgggggaattatccaccccagagtctgagtctgtgacttgggaaacggccccggcattaccaggtgttgaattcgtgagaatacaaggagaaggcgtgtagcccgtgacccagtcctgccccagacaaaccgatattccctccaaagctctatttggcagaagaagtgttttcgttccctcttgcctgtggtatctcccctgataagcgttgtggattgttccagaccgtgttgacggggacagcttccttctccgcggctgccggccctgaccctgcagctttcagtctgtgggagtagagtcagctgttgagcagtttactctgtccctgtgtcaatgggattgtgcatgttttggttcctgaggggtcattgatggtgcacttttcttttgttgttagtcaatttaatttgttactaataataaaatctggaacttacctgaccccaaaggcccaggtcgttaagaatgcttggtggaatgcacgtccttttcaaataccggctcctttggaaaacacagaggatggagtgaaatccttacctggattgtactggcagtgggatgacagcgtcacctcctgaaaatggaatgtagcttattgctaaataagacagcgcagtgcctccctcgcacctgtcatcttggtgcttagagaggccaaggtgggaggaattctcgaggccaggagttcaaaaccagcctgggcaatacagaaagagcctatttctactacaaatataaaaattagctgggcatggtgacatgcacctgtagtcgcagctacatgggaggctgaggtgggagaatcgcttaagcccaggaagtcgaggctgcagtgagctgtgacttgctactgcactccagcccatgcagctgagcgagatcctctttcaaacaaaccagccaactaacaagcaggccccaaggggacaatttttctggaattacctgattgtatcaagaacagtttgatcaacacctgtaatcccagtactttgggaggacggatcacttgaggtcaggagttagagaccagcctcgccaacatggtgaaaccctgtctctactaaaaatataataattagctgggcatggtggtgggtggctgtaatcccagctacttgggaggcagaggcaggagaattgcttgaaaccgcgaggcagaggctgcagtgagctgagactgtaccactgcactccagcctgggccacagagtaagactctgtctctctctgtctctctgtctctgtctctctctctccatatatacatatatatttatatatataacttatcttgaagacggttttggcacgccttaacttttatgccagaggccagtgccttgcttgtgtcaccctggttccaagaatctgcatagtttttcccagcccattctacagacagggaaactgaggaccaggcacactaggttcccctccaggagtcgcacagcgaggagaaagtggagccatgacttgatgccaaacactgagactccagaacccatattttctcagctcttaggtttttgtcaatttcctaaatttgtgtgtgttttagtggggctgagtttctcctgttaatttgtttatggagaggagacactcttgtttacttttttttttttttttttgagacagagtctctgttgaccaggctgcagtgcaatggctcaatctcggctcactgcaacctccacctcctgggttcaagcgattctcctgcctcagcttcccgagcaactgggattacagtcacacaccaccacacctgactaatttttgtatttttagtagagatggggttttcccatgttgatcaggctggtctcaaactcctgacctcaggtgatccacccgcctcggcctcctaaagtgctgagattacgggtgtgagccactgcgcctggctcttggcgttctcccttagtaatacttcttgggggtcattttgaatctctgtttcttctgtggtcacgttcatttggaatttacttattcaacccacaaccaatagacatttccagccctttgttagtataaacagaacttctctttgactttcacagcgtttttgttctggaggtgctatccttgattgctaagacacccacgacattgctcttggaattggagtagggtggatgaaatagtattcaaagatgggggtggtgcaaatgttctgtatttcaacctgtacattagtcaagtgttatttttaccctcatgtacatctattatggaataaaatacatgactttggccaggcgtcatggctcacacctgtaatcccagcactttgggaggctgagacgggaggatcgcttgaatccaggagttcgagaccagcctgggcagcatagcaagaccccttctctaaaaaaaaaaaattagctgggcatggtggtgtgtgcctataatcccagttactcgagaggctgaggcaggaggatcagttaagcctgggaagtcgaggctgcagagagctgtgataggcagcctgggtgacagagaaagaccctgtctcaaaacaaaaaacaaaacaaaacatgacttttatggagttgagctcaacgtttgcatacacatgaggagcagaagctggaggtttcaaataaatatctggcttctgcaggctgcctggagagaggtgagagcgatgcattggtcacccagcctggagtgcagtggtgtgatcacagctcactgcagccttgaccttctgggcacaagcaatcctcctgcttcagcttcctgagtagctgggaccacaggtgtgtgccactatgcccagctaattttatttatttatttagagatggaatcttgctctgtcgcccaggctggaatgcagtggcacaatcttggctcactgcaacctctgcctcctgggttcaagcagttcccatgcctcagcctcctgagtagctgggatcacaggcatgtgccactatgcccagctaatttttttttttaatggagtcttgctctgttgccaggctggaatgcagtggcgccatcttggctcactgcaacttccaactcccctgttcaagcgattctcctgcttctgcctctcgagtagctgggattacaggcacgcgccaccatgcccagctaatttttgtatttttagtagagagggggtttcgcatgttggccaggatggtctcgatttcctgacctcgtgatccgcccacttcggcctcccaaagtgctgggattacaggcgtgagccactgcgcccagcctaatttttgtacccctagccgagacagggttttgccatgttatctaagctggtctcgagctcctgggctcaagcgatccacccgcctgggcctcccaaagtgctgggattacaggtgtgagccactgcgcccggccacagctgttgttttctcactggcttgagaattgttctcttaagctggtcaaggttatgacggtttgtgtggcctgtgcacgtgtgtgtggtcaaatcccatttttctaaagcaaagtttctatttgggtatctgctgtttaatttttcagggattttttttttccggttgctaaggaaagtacattaaattttatctttgtatcctgtagaactctttgtgaataatacacggccagagggaagataggctgaggaaacagataggaaggaagttcaagggggggatttctatgtgagaaccaagaaacacctttgatctttagatttcaaagtgggaagttcaaggtgaggtgggcgtggaattaggagtaaacccaagaagagcgagtgggcggttcctcctggcagccacagaatagttacgtggcatgaggtcagtagcatctcagagggtgttgttgtctttgacttagatgagttccaagaagcagaagttcgtgagccaaacacgaggtggttttctggggggtacaagggctggaagaggggccagctcttaaccacaaatccctttccatgcccaaggccaagctccttgtaactcttttctttctttgcctccctccctccctccctccctccttcccttccttccttccttccttccttccttccttccttcctttccttccttccttctcaaacaaggtctcactctatcacccaggctagagtgcaacggcacagtcatagctcattgcagcctcaaacccctgtgctcaagtgatcctcctgcctcaggccctcaagtagtttttaaacttgtttgtagagatgggtcttgctatattgcccaggcttgtctcgaacttctggtcttaagcgatcctcctgcctcagcctcccaaagtgctgggattacaggtgtgagccactggcccggcccattctcctttctttagccaggctagggagacataagtggggaaactcatgttgttttttgagatggttgctttattctcgtgatattttccctctttccaacttccttgagccctccccagcctcctcttagtgtctgtgtgtgggtgagggggctttggtataccttctgctttgggtctcattcattttaattttttattttgttttgttttgttttgttttgagatggagtctcactctgttgcccaggctggagtgcagtggcaccatcttggctcactgcaacctctgcctcccgggttcaagcgattctcctgcctcagcctcccgagcagctggggattacaggtgcatgccaccatgcctggctaatttttctatttttagcagagacaaggtttcaccatgttggccaggctggtctcgaactcccgacctcaggtgatctgcttgcctcagcctcccaaagtgctggggttacaggcgtgaaccaccgtgcctggccacgggtctcattcattttagttggagcccaaattcactggtggttcaagttcccaatcattctcggcattctataatcacaggcctcagagagtaatgctcccaatggccctcaaattatggtttccttaggaggctattaaatcttgatttctgagaggaaaattggggattttgtgttttcccttttagacttgagtgttctgttactgtggatgagctcttctagaaacttccaagcagtttcaaaggggatttagatgtcatcaggaagtgtggttgacaacgtgatatttgggctttagaaaaacagcgtgtcacccgttttatttattccttgatgactctttttttgtttgtttttgttgtggtcgttgttgttgagacagggtctcactctgccacccaggctggactgcactggtgcaatctctgttcactgaaacctcctcctcctgggttcttgcaaatagacagtcccatttggtggtgacgggagacagtgacagatcatcaagcattagattctcataaagagcgtgcaacccagatccctcgcatgcacagttcacaatagggttcacgctcctaggagaatctaatgctgctgctgatctgacaggaggcgcagctcagatggtcatgcaagcaatgaggagtgactgtaaatacagatgaagcttccatcgctcgcccgcccctcgtccactgctgtgcagcctggttcctaactggctggtttgaaactagactgggcaacatggccaaaccccgtctgctcaaaaaataccaaaattagctgagtgtggatcacaagtgtgtgcctgtagtcccagctacttgggaggctgaggtgggaagattgagtgagcccaagaggtagaagctgcagtgagctatgatcacacccactgcactccagcctgggttacagaatgagattctgtctctcaactccctgaggggtgggggacccctggtttaatccatccaaccctctcttcccatgaaataaaggaagttgtgagtgctattttgtgcgtcatcccctccagtattcaagtcagcccaaggtacttcgatggttcccgtctgcacatggggaaaccgaggcacagaaagcagactcatgtgaccaggaagtagctgtgtctgctcgaaactcaggtcgacctgataccataagtccttgcactccacgtgctggctattgaagctgtggctcgcaggtctgatgggagagcctcagacagtgtctcactctgtcacccaggctggagtgctgtcatgcagtcataacccactgcagctttgacctcctgggctaattgatcctcccacctcagcctcccgaatagctgggactacaggtgtgcaccacaatgcccacctaatttttgtattatctgtagagatgggcgtggggggtgtgaggggtcttgccatgttgcccaggctggtcttgaactcctgacctcaggtgatcctccagcttcagcctcccaaagtatcgggattacaggcatgagagagccactgcaggaagccaagagagcagatttggacaatgtagaatttctccacgctcctcctactgtccccatcttaggcctggctactgcgggactgacaggcatggctggctgtccatccgttccttagtttgattgcatggcagacatgaggaaggaaggtgagaactgagctagaaagttggcatttggtgctctggtttctcaatgcaagaaagtaacactttggcttttatagaataaccttctgaggaaattaacaacccgggcgtttcagccccctgtgaacttgattggagcatggtcacaatttgtaacgaaatgtgcttgcatgcccagtgctaaagatttctctctgtctaccctctaggctgtggaaaggtctgttctaaccattagcttgtatctggagctcagatggtgccggacactccgtaggagctcagatctgttgatagaagccactagagaatgggacaagcaacaggaggtgttttgctgcctagtaaactttttttgagatgaagtttcacttttgttgcccaagctggagtgcagtggtgccttctcggctcaccgcaacctctgcctcctggcttcaagcgattctcctgcctcagcctcccaagcagctgggatgacaggcacccgccaccatgcccggctaattttttttgtatatttagtagaaatgaggttttgccatgttggccaggctggtctcgagttcctgacctcaagtgctctgcccgcctcggcctcccaaagtgctgggattacaggcgtgagccactgcgcccggctctacccatctttcttacatgatgatgttcagcagccagcctgataggggagcattgtttgtcctttttttccttattgcattttccccgcataggtgccagggctcagtagcataaatccaggtagaactgggaagttccaggtatctgggctgtttgctctggtggacaaagagcagctgcaaggtgggtcttgattagccagtgaagtctgaggatccagagggaaacttattcctttcttttgttgaaatcaacatgagcaggaaatggatctttcccccaatcagagaacttcacatgtttttctaatagaatagcagtgtctgaggtatatacacggggagtggccccccgggaaaacgaggccatgaggctcctggcatggagatgacacacgaagactctcgtaacttatagaggggaaaataaagcagtcattccaggctgggcatggtggctcacgtctgtaatcccagcactttgggaggccgaggcaggtggatcacctgaggtcaggagttcgagaccagcctggccaacatggtgaaaccccaactctactaaaaataaaaaattaaaaaaaaaaattagttgggcatggtgctgggcacctgtaatcccagctactcaggaggctgaggcaggagaattgcttgaacccgggaggcagagattgcagtgagccgggagcctgtaatcccagctactcaggaggctgaggcaggagaattgcttgaacccgggaggcagagattgcagtgagccgggagcctgtaatcccagctactcaggaggctgaggcaggagaattccttgaacctgggaggcagagattgcagtgagccaagatcacaccactgcactccagcctgggtgacaagagtgaaactccatctgaaataaaataaaatataaaagttaaagcagtcatcctggcttttaggaacccgcagaatcaggaggtaagctaaaagtcgtctcccttttgtcacgatggaatgtgaaataggtgcattttccttctgacttatgattctgtttcacggtgcctctgcagaaattcagtacgtccccatgggcacctgtgtccttcaggagttgaggaaattttctccattccttgtccctgtccctagactctgccagctcgtgcatgtagaagctcccgggaaaactgtcaacctgtgcacattcaagaccgccatatacttgttattgaaaagccatcagtcatgtgagcagaacttttttatggttgagattgtccccagggaaacccgccttgcaattcagaccttccacggagatcgattccaaactctcatcccgttcccacttcctcgttcccatggaggctgcggttctctctctctgtgccgcttacagattgtcatacctatttccaaaaatgacacagaaaacttcaacgtgtggctaaatttgaacagagaaaaataagcaaagaattcaaggcgcgaggcgttttcagggagagagggagagcttttgcatggtttgaagggatgatctttaatgagttgagggtcacctagaatagaattaaactgtagagagcaaattgttggaaatgcaaggagaaacttcggagaagactccaacacagcctggatctgggagatgagactcaggtaacaaaaagtttgaataacatggttaataagattgtggtaacagataggactgaactttgcactctgcaaacaatatacattttaaagtgctcttggaatagttagaaaaatcaatcatctgttaaatctgaaaaaaaaaaaaaaaaaacaacaaaaccccaccccaaaccaatacattccaaaaaagcagacattgtacgggttctaatctctggctgcaagtaagcataactggaattaatttttaaaagcttaactgaacaagcatgtaagagagactcctaccacttgataattaaaaagaaaatgaaaaccaaaaaaacaaaaacaaaaaaaccgaaaagggctgggcaccatggctcacgcctgtaatcccagcactttgggaggccgaggcgagcggatcacctgaggtcaggagttcgagaccagcctggccaacatggtgaaaccccgtctctactaaaagtacaaaaattagctgagggtggtggcgcataccctgtaatcctagctacttgggaggctgaggcaggagaaccgcttgaaccccgggggcagaggttgcagtgagccgagatggtgccattggactcttctagcctgggcaacaagagctaacctccatctcaaaaaaacaaaaaacacaaaacaaaacaaaaaaacaaccaacccctaagtcttaagttggaggatcgaaacactgcaaggatagactatttgaagatgacaatgatgtgaacatggagacaaaggcagaggtttaaatgattatagaggaaatttgcttgataatttattatatgaatatagagagaaatcacaaaaatgagatgatgaatattggaaataataagcacagacgaactgattagaaaacaaatagaactgacaaaatcaaaaagctggatcttttagagagatgctgctcagtagggtggccacaacccacgtgaaaattaaattaaaaattcattttctcagtcgcacgagccaagtttccactgcttaggggccatgtatggttagtgactactgaaatggatagaacagatacagaacttttccatagctgctgaacgtttgttggacagtgctgttttagagggaggaatcaataaaacagaaaaactaagacaaaggagggggagagaacaaatattgtagataaaattaagaatgaaggcctagcgcggtggctcacgcctgtaatcccaacactttgggaggccgaggcgggtggatcacgaggtcaggagatcgaaaccatcctggttaacacggtgaaaccccgtctctactaaaaatacaaaaaattagctaggcgtggtggccgcgcctgtagtcccagctacttgggaggctgaggcaggggaatggcgtgaacccgggagggggagcttgccgtgagccgagatcgcgccactgcactccagcctgggcgacagagtgagactccaactcaaaaaaaaaaaaagaatgaaaatagatgtaatttatttattattgattgattgattgagacagagtctcacttggtcgcccaggctggagtgcagtggtacaatctcagctcactgtaacctctgcctccagggttcaagcgattctcctgcctcagcctcccgagtagctgggattacaggcgcccaccaccacacccagctaatttttgtatttttagtagagaagtgatttcaccctgttggccaggctggtcttgaactcctgacttcaggtgatacacccgcctcggcctcccaaagtgctgggattaaaaacagatgtcatttaaatccataaaaaattgtaaagacagctctactaacaattttggaaatattaaaaataacttcatttactgattcaagtgttacttttatttagcttaattgtttctctttaccagaaattgaggctctgaatttgccccagagaatgggtatgccattctctctcataagctgtactctcttattatcagtaatttctaaatagcctgtaaaatttatatggactcaaaatgcaggaaacatcaataggttgaaactcaacaacttgtaaaaagttactcctgtacttaattgcataaaatgtgtattgcctacatgaatgagaataaaaacttccaaaatgcccccaacaaacaggggtttttgcaccttgccatgagtagctttctggagcaagccggagtggttagagctgtgactcggcaaccacaaacacaaccatttttgtgtggaagtgtggctcttcagccttttttttttttttttttttttgagataaggtctcactctgttacccaggctggagtgcagtggcgtgatcctagctcactgcagcctcaacttcctggactcgagcaatccttctgcctcagcttcccaagtagctggaactacaatcatgtgtcatcatgcccagctaagttttattttttttaatctttaatttttttaagaaatagagatgaggtcttgctatgttgcccaggctggtcttgaactcctaggctcaagcaatcctcctgcctcagcctccccattagctggaactacacttgtgtatcatcatgcccagctaatttttaattttttatttattatttttttaaagagataaggtcttgctctgttgcccaggctggtcttgaactcctaggctccagcaatcctcccacctcagcctccaaagtgcagcctctatatcttgaactccacacctcaaacccagattgtccacatgtgagcacctgtctttttggtttgctgtttctctcgtgagttgtatccagttgcccaaggtggaaagttgggcgtcatccagcaggtaagtcctgacacctccacctccccgatggcttcagaagccagcctcttcttttctgtttcctctgcctctcaacttcctcatccatctaccataagccagaaaaatgacccccaaatgtgaatccgatggtgttctttctgcctgacatctttctttggcttctgctgtggggtaaagtccaagccccttggttccctgtctttcctctctggtctaatcttctattcctctcatcctgtactttgcccttcatcaactctgaactgtttatagttctctgaacatagcccgagtgattcacacatttgcatgtactgttcctctcctgctgtgataaagggacagtcacctaatccccgcccctccgttgcattttttttttcctacaagatttattatgcacctactgtgtgtatggctctgggatgctgtaataagcaagacagacacatctttcccttcacggggcgtatgtgtctcgtgcatactgggagggcagggacagggtctccattcatttctgcattccaatgccaagagggtgtcagatctgggtgggtcgaggtagggaacaggtaaacataactcacagtgtgatgccgtgttacagccaggctgggttcctcacgcctgtgatggcagcgctttggggagccaaagtgggaggattgcttgaagccaggagtttgagaccagcctaggcaacatagagagacccgctctcaaaaaaaaaaaaaaaaaaaaaagctgtcgcagtggcactctcctgtagtcctagctccttgggaggctgaagcggaaggatcacttgagcccaggagtcctagactgcagtgagctatgatggctccattgcactccagcctgggccacagagtaagaccctgtttcaaacaaacaaacaaatttaaaaaatcaaacaaactcccactcccccaaactccataccacaccctctcctggtctctctgggagacctggattcgagttctggcagagctggttattggcaaagtagcccctctatgcctcggtttctccaattctaatggtgatgattgcttgaataattgagttaatatgacctcattgatggattggaccgtgtgtgctgcaaacagattacacactttaaagtgtattcatgcctgtaatcccaacactttggtagactgaggcaagaggatcacttgaggccaggagttctaaaccagcctgggcaacgagtccccatgtctacaaaaaaatagaaaaaattagccaggcatagtgatgcacgcctgtagtcccagctactcgggaggctgaggtgggaggatggcttgagcccaggagtttgaggctgcagtgggcgatgatcacaccactgcactccagcctgaggcgacagagtgagaccccccccccaaaaaaagtgtatttatgggggtgaatgttaaatgagaatgtccactcgctgccttggtttactggaactgcaaattcaatggggacacacaagttttcaaatgcatgcggaatactggctggaggttaccccaaaaacgtagcctgtggattttaagaatgtatttatgagtatggttctcgttttctgggtgagtggtgggtgagaatagagggtgcactggcccggcgagttcggagatgcggaccctccccccctgcaatgtgaggaattttgctgtgtgaccctagtgagccgctgcacctttctggacccctcccgagggaggcctggggtcagggggcccctcggcagtcccgggagctgccacgcggtgacccgatctcctcccgggcacacgcccagcgccgcgcgcagcctaagccaccccggtggatgcttgatgagcccttgcaagctcggtttctccttttccctagctttttccaaagttccatccgtggcagactcgacctgcggggtctgcagccacgaggggccctcccagggcgccctttcctctggccgggaccgcccggcggcggccactgcccgagcgccagtctggggagcggagcccggcgcacccggggggcggggccagcgcccctgcagcacgcccgcccattggctgagcgcgagggcggcgctgcggccgccgcaaccgccggggccggattccccggagcggagtgcgccccgggctttgtgctgcgctgaggcctccggctcgagggggcggagccttgagcgcctagggctccctccctcgcccccatgggcacacacgcagacacgggcacacacgcagacacacacacacgcccatcatggacacacacacacgctcgcccaccatggacacacacacactcccaccatggggacacacacacactcccaccatggggacacacacacacacacacacacacacacactctcactctggaaccgaccaatcctggggctgcacagacacacacgcgcacacactctctctcgttctctctctctctctctcgttctctctctctctcgctctctctcccactctggaaccgaccaatcctggggacacacacacacacacacacacactcccactctggaacctgccaatcacacacacacacacactcccactctggaacctgccaaacacacacacacactcccactctggaacctgccaaacacacacacacactcccactctggaacctgccaaacacacacacactcccactctggaatctgacacacacacacacacacacacccaaacacacacactcccactctggaacctgacacacacacacacacacacacacacacacccccactcccactctggaacctgccaatcctggggctgctctagcgaggagacccctgggaccccgcctccttccgggcctctgcgtgcgcagtatatctcctaagagatccgcagcatggagagggcccgcccccgtggacggactcactccctccccactcactcactcactcgcttactcactcactcactctctctccgaagagaagaagcctgcggctcccgaagcgggaaggccctctggtactctgttccctttctagcctctatatgcgccgtatgtctccaaagagctgcgcagttctattccaaaggcgtcatcgcgtgtggggcggtattgtcaggcaaggaaaaggggcgcttccccgcttcaaggacacgcgctcctgcggtcgtcgctgctgaccacgaagctgtcaaaagttcacctccttggctgcccccaacccctgcccctttgccattaaatcatttactagattccaactagaggaatttggctccggggactcgaacctctgaggtcagggtctggggccagtgtgggagagaaaggccttgaatggaaacaaaataaattactttaaggagtttataaaactcacacttatagggagagccgcggggccctgtggtcaatgtaccagcaggcccatgacgcaactgttccgtttggaaatttctggaaagcagtaatttttggaatcataaatcttgagtattttttttttaaactttggaaaggtttttaaactttttttttttaagttttttttaaacttcggaaagttttaagctttggaaagaatgtaacaaaatgttattaacatatgtggagctatcgaatcatttaatggtggtttctgtattttctgttttgttttttatcacataccttcttaattaagaaaaacccaaactaatttgaactttaaaagggaggcaaacaaaaaagtgtcagagtgactggatttttgtgcgcaagtcatttaacaatgcagcgctgcgtctcctatttctctggcttttaaccttgctttggacaaattggtcgctttttgttttgatgtcgtttcaagcttacggaaaaattgcaagattatatctagatcaatcaattgtttacgttttattctacttgttttattacctttctaatatatttatgcacacacattatatacatttttttcccctgaactatttgagagttagttgcaggcatgatacatactccttaattcttcagtggatatttcctaagaacaagaaagttctgaggccaggcgtggtggctcatgcctgtaatcccagcactttgggaagctgaggcgggcggatcacctgaggtcaggagttcgagaccagcctgaccaacttggagaagccccgtctctactaaaaatacaaaattagccaggcgtggtggcacatgcctgtaatcccagctactcgggaggctgaggcaggaggttcgcttgaacctgggaggcagaggttgcagtgagccgagatggtgccattgcactccagcctgggcaacaagagcgaaactccgtctcaaacaaaaaaaaaaaaaaaaagaaagaaaagaaagaaagttctcttacataatgatggtactggtgccgttgtcaaaatcaggaaattaacattgatacagtattttaatccaatgtcttctataatcttatctgttgtctcaatattgccctatatagattttttttcctaggcgaaggttccaatctaggatcacactttgcatttgaatgctgctgtctcttaagtccgcacaattcctcagttttctgtgtctttcccaacattggcttttatttatttatttatttatttatttttatttttttttgaggcggagtcttactctgtcacccaggctagagtgcagtggtgagatcttggctgactgcaacctctgtctcctgggttcaagtgattctcctgcctcagcccccaagtagccgggattacaggcatgcgccaccacacccagctaatttttgtgtttttagtagagaaagggtttcaccatgttggccaggctggtctcgaactcctgatctccagtgatcttcctgcctcagcctcccaaagtgctgggattacacgtgttagccaccacacctggccaacattggcagttttgaagagcacaggccagttattttatcgaatgacctcaagctagggttagtaatatatggaaagaaagctacacaaatattttgtctttttcattgcctcataatgggaagtacgtgttgttgccttgtcccactattgtgggcaatgttacttgaagtatttttaactagaatttttaagaagaaatacatttcccgtaaggctcagtacccaagacatgcatatacctgaatgaaaagtttcccacaacaagatttactcttgccattttctagtactgtgggattttttccttttcttttccccctgcaggaggggatgctgctgggggctgaggacaatgctaaacctggatgtctcgaggacaggggatggggtttttgtgtcatctatgttctgatgctttttcatttaatacgagaacaggtttcctatgatttggcacactgggacattcgacatgtgtttgttgaatgaaaaaaagaaaaaagagaaatgctaacaatttgttgaatagtccataaaagagcaaagctggcctggcgcggtggctcacacctgtaccagcactttaagaggccaaggcagacggaggtcacgtgtttgagaccagcctggccaacatggtgaaaccgcttctccactaaaaaaaaaaaaaaaaaaaaaatcagttggtgtggtggcgtgtgcctgtaatcccagctactcaggaggctgaggcaggagaatcgcttgaacccaggacatgggggttacagtgagccaagattgcaccactgcactccagcctgggtgacagaaagagattttgtctcaaaaaaaaaaaaaaaaaaaaaagcaaagctattattaaaacacactccacacttcacccctgagccccatattgattttgtaataaggcaaagataatttttttttctttttttgagatgaagtctcattctgtcgtccaggctggagtgcagtggcacgatcttggctgactgcaacgactgcctcctgggttcaagcaattctcctgcctcagcctcccaagtagctgggattataggtgcctaccaccacgcccagctaatttttgtattttgaatagagagtgtttcaccatgttggccaggctggtctcgaactcctgacctcaagtgatcttcctgcatcagcctcccaaagtgctgggattacaggcgtgagccaccatgcccagccaacaaagatgattttaagagaacctttgtaaaagctctcaccgatgcctgtcattattagaatatttgggagtagaatcatgtaactgatcaataacattgtttactgtctagcagaggcttttgaaaaatgtatttcctggctgggcattgtggcttacgcctatgcccagtttgggagctcggggagagcggatctcttgagcctaggagttcaagaccagcctgggcaatattgtgagacctcatctctaccaaatgtatatatacatatacaaaaattagccaagcatggtggtgtacgcctgtagtcccagctactcaggaggctgaggtaggaggagcacttgaacctgggaggcggaggttacggtgaaccaagatcatgccactgcactccagcctgggcgacagagtgagacactgtctctaaataaataaatgaaagaagaagctacttgaaaaaaatatgtatttccaaatatatgtcagttttgacaggatagtacacatacatagtaaaaaataaaaataaaatagggcacttttttgtgtccctttcagagggacatatgtcccatgtgtcctcccccctcctgcccctaatttttttgtttgtttttttatgagatggagtctcactctgtcgccaggctggagtgcagtagcgtgatctcagctcactgcaacttccgctccccaggttcaggtgattttcctgcctcagcctcccatgtagctgagactacaggtgcgcgacaccatgctcagctaatttttatatttttcgtggagacggagtctcaccatgttggtcaggatggtttggctctcctgacctcgtgatccgctcaccttagcctcccaggcttagcctccttagcctgctgggattacaggcatgagcagaagaatctcttgaacccgggaggcggaggttgcagtgagctgagatcgtgccactgcactccagcctgagggacaagagtgagactccatctggggaaaaaaaaaaaaagaaaaaaaagaaatactgcatcaaattgcacttgcctcttggtgcaagattcgttcctttgctttgaactgcctccctgaagcaaattggtgtttctgtgactccctctgtctagggaaggggtcctttagtggggacattgtctttcttggggagggtccaccagaggactctgacacagcggtctcctttctcctccgtcaacttagttagattttagtccctgatcttctcagcagtgtatagtgaaaaagccaccgcagctgaaagtttcaggaagatgatagttgcttctgtgtgctcacccaggagcttttgggaggtttagggagaactgggggaaaattgggaccagcagctcaatgtggctttgaaggggagacagcggatggacacagaacttgcatttttggagaggggaggtctgggtagatgttccctacatacacagcagcacttgtgtgcaggtgtgagggagtgacagcccccggacggtttggcattttcctgcaagtctgccatcttgtctggcagacatagcctgggctgctgactgtccctaccccaaaccagaatttgggcaggaacggacacttgggctcattacgtgtcaatgagggggatcaggtcaggggcacagggagaggaaagtcaaccccgtcctccactggggctgtttctcatcttgcatgacacgtggctttcataatgtcttcactttgcggtctctctcaccagaagaagctgctgttttgtggctagttcatctgtgtcatgccctttccccagcctgggctgcctgtgatttttttcttttcttttcttttcttttcttttcttttcttttcttttcttttcttttcttttcttccctccctcccttccttctttctctttcttttctttctcctttctttctttttctttcttttttcttttctttctctgtctttctttttctttctctttctctctctcttatctttcttctttctccctctttcttttcttttttctctttctgtattctttcttctttctctctttctttccttctttctttctccctcccttcctgcctctttctttctctttctttctccctcttctttctttctctctctctcccctccctccctccttccttccctccttctttctttttatctctctccttccttccttccttccctccttctttctgtctttctctttcttttctctctctcccttcctccttccttccctccttctttcactctctctttcttttctctctctcttctttttaaagatagggtcttgctttattgcccaggctggagtgcagtggtgcagtcacagctcactgcagcctcaaacccctgggctgtagcaatcctcccacctcagtctcccgagtagctgggactattggtttacgggtgtgcaccatcacacctggctaatttttttatttttgtagagacaggggtctggctattttgcccaggctagtcttgaactactggactcaagagatcctcccgtgttagcctcccaaagtgccattacatgcacaagccactgcgcctggcaggcttgtgattttcatgtggagcttttcacattctgtctaacaatccgagttcagaggaaccagtatggggagcaagagtatgtggaaacgtccagcaccagtttagaggactcccactcagctagggggtgcagtggccaccccgagtggcttttctttcttttctttccctccttccctccctccctccctcctttctttctttctttctttctttttctttctttctttctcttttcttttctttctttttgagacagagtctcactctctcttccagcagtggcacaatctcggctcactgcaacccccgcctcccgggttcaagcaattctgctgtctcagcctcccaagtagctgggattacaggcacctgccaccacgcctgtataatttttgtatttttagtagagatggggtttcaccatgtcggccaggctggtctcgaactcctgacctcaggtgatccacctgccacggcctcccaaagtgctgggattacaggcgtgagccaccgttcccagcctctatttttttaaaattgacaaataataattgtatatgttacatatttatggggtaccatgtgatgttttgatatctgtttacattgtagaattactaagtcatgccaatttaaaagctatcacctcacatacttatcattgttttatggttaaaaatatctacatttttggcaattttgaaatgtccagtgcactattacttattatagcaaccattgtgtccaatacataactaaagcttatttctcctaagtgaaattttgtagtttgatcaacatctccctacagagttggaaacacctggaatgagcttatagtgttcgaaggatagtcttcaaagaattggttgggcgcggtggctcacgcctgtaatcccagcactttgggaggccaagatgggtggatcccgaggtcaggagttcaagaccagcctggccaacgtggtgaaaccccatctctactaaaaatacaaaaattagctgggcgtgatgacgggcgcctgtaatcccagctactcaggaggctgaggcagagaattgcttgaacccgggaggcggaggttgcagtgagctgagttctcaccattgcacttcagcctggacaacagagtgagactctgtctcaaaaaaaaaaaaaaaaaaaaaccaccaaagaacacaggtcagcatgtttatttaacccattagtgagggaacagcaggattataaagccaaaacatgtatagtcactgaaataagaaggcagtgttagctgtgaggctgcttaatgtcccataggacaataaaactgtaatctttggggatgatttttttcttttttttttcggcaaggagagataggatctcactctgttacccaggctggtctcgaatgcctgggctcaagcaatcctcccgcctcagcctcccaaagtgctgggattacaggcatgagcctccatgcccagctgagagtatcttttctctgagatgaaaataatttgtagcatatctgtctgtaagttaactctaatttccttgagtctagttcctaatagaaatagtaaaatcggccaggcgtagtgggtcatgcctataatcccagcactttgggaggccaaggtgggcagatcacttgaggtcaggagttcaagaccagactggccaacatgctgaaacccagtctctactaaaaatacaaaaattatccaggcatggttgtgggtgcctgtaatcccagctactcaggaggctgaggcaggagaattgcttgaacctgggacacagagtttacagtgagcggagatggcaccgctgtacttcagcctggacaacagagcaagactcggtttcaaaaaaaaaaaaaaaaagtaatagtaaaatcaattacaggtacatttaactagtgcaggttgataaactatctggcccatcacttgcttttataaataaagttttattggacctagccatgcctcttcatgtacatatgtctgtggctgctatcatgccatcgtggcagagttgagtagtttcaaccaacaccatatgtcctgcaaagcctcaagtatttgcttgtggccctttacagaaaaagttgaccaactcctgtgctgacaaatgaaatagctcagataggcctgtcagctagggctccaacacaggattgcaaagtctcgcagcctctggccttgtttgcaatggttggataatttttcttcccattgtctaggccggaaggacttatgtgtttgagaggtttgtgttaggccattgatgacgcctcttttgaatgaaagggctgaccctctgaagtggctccagcccaggaaacaagccccttcctcttgtgtgtgtgtttccttgccagagtgctggaactccgtgggtcctggatcattgttgtctgccttgtatattgcttccttcaattgaatttcagccctcaggttcccacagacagatcagtgttaatgatgttgataattatgataattatagataccctctgtagttaatttctatcaagcctaaaaatgtctctatcaaagaatctgatgtgttactgacgtcatcctgtttatttcttgcaacagccttaagaaggaaggaagggactcttattaacaatcccccctccctttttttttttttttttttttttgagatagagtctcgctctgtcacctaggctggagttcagtggcacaatcttgactcactgcaaactcctcttgcgttcaagcgattctactgcctcagcctcccgagtagctgggattataggcaagcaccaccacacccgactaatttttgtatttttagtagagacgggtttcaccatgttggtcaggctggtcgtcttgaactcctgacctcaagtggtccacccacctcagcctctcaaagtgctgggattacaagcatcagccactgtgcttagccctattagaacttcctaatattcttgttttttttttttttttggacggagtctcactctgtcagccagcctggagtgcagtggatctcagctcactgcaacctccacctcccaggttcaagtgattcttgtgcctcagccttctgagtagctgagtagctgggattacaggcgcccaccaccacgcccagctaatttctgtatttttagtagagtcggggttttaccatgttggccaggctggtcttgaactcctgacctcaaataatccacccacctcagcctcccaaagtgctgggattataggtgtgagcccccgcgcccagccccaagataattttcaagagtgatccatgccataaggaaaatgtaatgagataatgtgttagcttatgaatggagcaggaagggcgacttctgctggggaagtcagggaagatctgtgtaaggacctgaaggatgcaaaggagcaagtcacaaggggacaagggaccagggtgctccacccagaacagcttgtgcaaggtcctaaggtagggctgagcctgggtgtgtgtgggtgggaggtgcagaaaggaggccagcctgggagaagaatttagcaagactggcagggattagaccccccaaggcctgtagggagttggcttttattctgtatgcctgaactgtctcgtctgggagacggtagtcatctgtggctagtaaacattggaattgtgtcaggcacagtggctcatacttgtaatctcagcactttgggaggctgaggtgggaggatcgcttgagccaggagttcgagaccagcctgggcaacatagtgagaccccatttctacaaaaaattaaacacttagctgggcgtggtggcgcatgtccattattccagctacccaagaggccgaggtgggaggatcacctgagcccaggagattgaggctgcagtgaactgtcactgtgtcactgtaccccagaacctaagtgacagagccagaccccatcacacacccaaaaaagaaatcgttacacattttatccatatgacaaaatatcacaagtaccccataaatgtgtaaaatattctgtatcaatgtaaaactttttaaaaattttaaactgaaattaaaatgaaatgcagttaaaagttttgttccttggtaaaaattggagccctggtacactgttggtgggaatgtaaaatactgcagctaggctgggcacagtggctcacacctgtaattccagtactttggggggccagggtgagtggatcacttgaggtcaggagttcgagaccagcctggccaacacggtgaaaccccgtctctactaaaaatacaaaaaaattagcggggtgtggtggtgggcacctgtaatcccagctactcgaggctgaggcaggagaattccttgaacccaggaggtggaggttgcagtgagccgagatcgagtcactgcactccagcctgagtgacagagtgagactccatctcaaaataaattttttaaaaaagaataaatcctatattattccacttatatgaggttcctagagtcatcagagtcacagagacagaaagtaaaatgggatgtcgggcgcagtggctcacacctgtaatccctgcactttgggaggctgaggcaggaggatcacgaggttaggagttcaagaccagcccggccaacatggtgaaaccccatctctactaaaaatacaaaaattagctgggtgtggtggtgggcgtctgtaatcccagctactctggaggctgaggcaggagaatcacttgaacccgggaggcagaggttacagtgagctgagatcgcgccactgcaccccagcctgggcaacaaagcaagactccatctcaaaaaataaaaataaaaaaaaagaaaagaaaaagaaagtaaaatggcaggtgccaggagttggggaggaggatgagtgtgactgtttcatgggggcagagtttcagtttggttaaggtgagaaagttctggagatgggtggtggtgatggttgcatagccacataaaagtatttaataccactgaactatacatttaaacatgattacaatggtgaattttatgctatgtgtattttaccacaattaaaaaaaaaattggatttcctagttgcactaagcacattcagaagccacaggggagaagtggctactatgttggatggcccagatagagaacatttccgtcatcgcagaaatttcgaccagatggtgctgttcatatatggatgtagcttctggggccacttctgttccctgagtttggccggtgggatccactgtgctgagaatcacagtctggggatttggggtgaagaacactccccaactttctttcttattttttgttttgtttcattttttgttttgagacagagtctccctctgtcaccaaggctggagtgcagtggcatgatctcggctccctgcaacctcccctcccaggttcaagcgattctcctgcctcagcctcctgagtagctgggattacagacgcccaccaccacacccggctaattgtttgtatcatcagtagagatggggtttcaccatgttggccaggctggtctgaaactcctgacctcaggtgatccgcccaccttggcctcccaaagtgctaggattacaggcatgagccaccacaaccagccttttttttttccttccttccttccttttctctctctctttgtctctctctctcttttttttttttttttttgacagaattttgcacttgttgcccaggctggagtatagtggcacgatcatggctcactgcagcctccacctcccagattcaagtgattctcgtgcctcagcctcctgagcagctgggattacaggcatgcaccagcacacctagctaatttttgtatttttagtagagacagggtttcaccatgttgaccaggctggtctcaaactcctgacctcaggtgatccacccgcctcgacctcccaaattgctaggattacaggcgtgagccaccacaccgagccacatttgcatgtttaagtaactaacatgtctcctccattagaccttgtgctcccaaaggcaggatctgcagccacttttttccccacagtggccacagtatctagattagtgcaagcaaatgtctgttgaagcaatcagtggtttgggggcaagttacttaacctccctgtacctcagtttccccatttgtaaaacaaaaaaataaaggagctaacagtgtatctacttcacatgtggggtgcagcagcatgctggagttggcttgctggagccagtggtgaaattttcaggcaatttgtgagccatttgttaaacatagatattcataaaaattacataaacctacagttaaacaaattacattaaaaacaaaagtttttaaattaacaaagctttttaaaagtaacaaatactcaaaactcaccacctcctaatatcatacgatgttttcctattatttgtgctgttgaggttatttactacttttgtgtcaatagtagatacattttgtgtatacttataaatactacttagaggaatgctactgtgtatcttttgtcagcttatgtttagtaacttcatgttggtggcctgaaatccaccactggtaggaatatttacaccatggaaatcggcaaatgctatataaatctgggcctccctgggcccctccctcaggcagctgttaaacatttacaagctcaccaatggtttggaggcttaaaccagttaatagatgtgtctgacatgtgggtaatgatgtagacgtgccgcttttactgttagtgtttggttggctttcactgtctgatccagaattgctgcatatgcagacaggaattggacaaagccatttatttatttatttatttatttatttatttatttatttatttccctctctctctctctctctctccagtttgcccgaccatctgtaagtcacacggctgcaccgccgaaggcctctgttgccacagcgagtgcctgggcaactgttctcagcccgacgaccccaccaagtgcgtggcctgccgcaacttctacctggacggcaggtgtgtggagacctgcccgcccccgtactaccacttccaggactggcgctgtgtgaacttcagcttctgccaggacctgcaccacaaatgcaagaactcgcggaggcagggctgccaccagtacgtcattcacaacaacaagtgcatccctgagtgtccctccgggtacacgatgaattccagcaagtgagttctggatgtgggtctggggggcagccgagaggagaaggaacgtggggttggttgtgacgatgccgcttgttaaaactgtgtgcaaacccagggttaattggctatgagtgaggtctctgctctcagatgctacttttgcaccctgttttggtcctgggcttgggagtgggagttgactacctttttctctaaaggaccagatagtatatacttctggcattgtgcccaccattctttttttttttttttgagatggagtcttgccgcaagactcccaagctggagtgcagtggcacgaacctggctcactgcaacctctgcctcctgggttcaagcgattttcctgcctcagcctcccaagcagctgggactgcaggtgcctgccaccatgcccggctaatttttgtatttttaatagagacagggtttcgccatgttggtcaggctggtctcgaactcccaacctcaggtggtccacctgccttggcctctcaaagtgctgtgattgcaggtgtgagccaccgcacccagtctggcattgtggacctcagttctaagctttctgtggttggcttcagaacaagaaaatataataaggacagagtccttggttttccctaaaatcctccacgtggcctgtcctcactgatgtagcttcatcattgtcacataaaggatataccaaggtctttcgtgtcttccctgacctgtagcctggtggtgtgccaagattagcccagaacatactgtctccaggaggaagagactcgcttctgcattattctcagggctttgctgttctctgaaggacagtataatcaaaccatttcctgccgtttgggtgagaaatagcagggttttctctcttcgacagagtcagatttcctacgcacatcgcagactttctgttcgtactgtgagcttcttccatgagctattttggggccgtaactgagttgcaaaaatctgtttcctggtttttgtattgaggttttatgttttgttttaaaacacacacacacacacacacacacacacacacacaccacaaaacaacacaaaaacaaatcagaaacagacacacatcaagaggccttgagctgacctgcttacgtaaagtatcttcctcttcagacttgagaattagccaagcgagagtgttggggtgggaaattgtatttccctgggtggagagggcgggaaggaaaacaagctgtaatttcagttcttatgactctttctttgagtgtttgtgaaacctgcaagtacaatatgttttgttttgctcgttgttgataaaaacctaccaaaaaaaccttttggctttattgaccaaaagggtctataaatcaccttttcataccagacagacttttgttttaggtttttttttttttttttggccagtgtattcccaagattgaggaaatgaccatattccttttgattcatttctttctttttaaaatcacaattgaaataaaaaaaatgggttaatatcttctggcaagatgtttgtttaaaagacattggccttaaataaaaggcatttttccctcaccttaacaatggcctgagaaatatagcaacctcctttgattttctcactgatgatgcgggagatgctaaaacagaaaccctgagaaattgaccgcacatccttggtatctgggacctttcctgaacggaagaaaacaaaggagaggggggtgcattgtcaccgtattttattgcgtaggtttaaaaaaattaatatttttatttctgaagcttttaattaattaatttatttattttgagacagagcctcactctgtcacccaggctggagtgcagtggcatgatctcagctcactgcaacctctgccttccaggttcaagccattctcctgcctcagcctcccaagtagctgggattacaggtgtgaggcagcaagcctggccaatttttttttgtttgtgcttttgtttttttgagatggagtttcattcttgttgcccagactgaagtgcaatggtgcgatcttggctcactgcaactcagcctcccgggttcaagtgattctcctgccttagcctctaagtagctgggattacagacatctgtcaccatacccagctaaatttttcttgtatttttagtagagaccgggtttcatcatgttggccaggctggtcttgaactcctgacctcaagtgatccacccacctcggcctcccaaagtgctgggattacaggcatgagccaccgcacctggcctgaagcttttctttttatcttatgaaagacttaatcgtactgtggcattttctaatgtggtttgatatcaaatagggccagatgttttcttccattctggtggcttatctgggaaggagttcttgatgttttcagagcagagttctgggaacccatgttaaaaggccttggccaggcacagtggcttatgcctgtaatcccagcactttgggaggccgaagtggacggatcatctgagggcaggagttcaaggtcagcctggccaccacggtgaaaccccgtctttactaaaaatacaaaaacaaaaaaaaaattagctgggcatggtgatgcatacctgttatcccagctactcgggaggctgaggcatgagaattgcttgaacccaggaggcagaggttgcagtgagctgagatcacgccattgcacgttagcccccaggcaagtgtgacaagagtgaaactgcatctccaaaaaaaaaaaaaaaaaggtctcaccatctactgtcgttccaaagtacctgctgggatgtaatagcacagtgctgcttcctgagatgagaaggaccagatatttgtgatgaataaattttcaatgcgtatggggtatccactgggaaggggagaattacctaaaatccttgattcttcttggcctctctcacttcttcctattaagctgaggtctcaaatttgtctacacctccatctatttcaccatcatgtctggtctgacccagtccccttgaacaatctctttgctcctgcttccattctagtgacactggtaaaaagtggccacctgggccaggcgcggtggctcacgcctataaccccagcactttgggaggccgaggtgggtggatcacctgaggtcaggagttcgagaccagcctgaccaacatggtgaaaccccatctctactaaaaatacaaaaattagccaggcgtgggattacagtgggcgcctgtaatcccagctactcgggaggctgagacagcagaattgcttgaacccgggaggtggaggtcgcagtgagccgagagtgtgccactgcactgcagtctcggtgacagagtgagactctgtctcaaaagaaaaaataaaagtggtcatctgatcatatgccatgtccttccctaaaaccctccggtggcttcccaagaccaatggacagaatccaaactcctcatcgggagggctcggccagttctcattctcatttcattccggtgccccctggccgtggtggtcgttaccgcaggagcttttcctgcaacttgctacatccgctttcctctgtgcctttcaattagctgttccctcttcctataatgcttgtccctgcatttgagaatgatccactttttcccctcgtcatctagatggcagcttaaaagtcacctccttggcaaatccttcccgtctgagtcaatcatccgtgcactctctgtcacatcatttagttttaactcttcgatttgtcactagctgatatttttgtcttttttttttttttttgagacaaggtcttggtctgtcacccaggctagagtgcagtggcacccacatggctcactgtggtctcaaccccctgggctcaagagatcctcctgccacagcctcctgagtagctgggactatataggcacacaccaccacacctggctaaaaaaaaattctgtagtgttgggggtcttgctatattccccaggctcgtcttgaactcctgggtttaagtgatcctcccaccttggcttcccaaagtgctgagattacagggcctgagccactgtacctagcctttgttgtcaatttattcactctccccaaccagatgataagctttgtgagtgtatcagctagctcttgttgcgtaacaaaaccacctcagtgcttagtggcttaaaacactcctttaggagctctgatgatttcatgtgttgactgaaggtttgtctggcctgggcctgtttagctacggctgatggtttaggggagcctcttgtgtctttgatggtcagtgggggtctctctccataagtctcttaccccagcagccaggaagggcagacctcaatgttcaagtgcttttcaagcctcagcttgtatcacgtttgcaaatattccattggccaaagcaagccatatggccaagcccagattcaacaggtgggaacatagactccacttcttggtgggagaggctgcaaagaactcatggtcatttataatttcccactgggaaagcatattatctgctttgttcactcatgtataccggcagctgagaacgggggttggccaagggccagatagtaaatattttcagctctcagggccatatggtctctgttggagctacttaactctgcctttgcagcgtgaaagcagggttagacgatgtactaaccaataaatgtggccatattccaataggatattatttgcaaaaacaggtggcctactggatttggctcccagcccactgtttgccaactccaggcttagagcattgcctgccacataataagaatagaggcaataaaagaagtcaaacatttggtcagtattttgtttctgcctcagctgttctgccactacctgggtgtacttgcaacaccgttctgacaccatcctcctccaaagttagcatcagacgccacaagtttaaggctcagccctccatgagatttcccttgcttcagacactggcagcatcttggggatcccccagccacccacacttctgactaactggctctaaattgggggattcccacaaactgtttgggtttcataatttactagaaggaactcacagaatgaaaataaacctggccaggtgtggtggctcatgcctgtaatcccagcactttgggaggccatggtgggaggctcacttgagcccagaggttcgagaccagcctggacaacatagtgagatcccatctctacaaaaatttaaaaacattagccaggtgagggggtgcatgcctgtagtcccaggtacttgaggggcttaagcaggaggatcgcttgagcccaggagttcgaggctgcagtgagctaagattgtgccagtgcaccccagcccgggtggcagagcaagatcttgtctcaaatttaaaaaccctgctatacaattacagttttattataaaggatacacatacggcaagatctgggagagttctagatgcagaatttccatattgcctcctcgtggcaacagcatgtatcaccctcttgacatactggtgtgtccaccagctgggaagtactactgagcttcagcgtccagagtttttgtttgtttgtttgtttgttttgagacggagtctcactctgtcacccaggctggagtgcagtggctcaatctcagctcactgcaacctccacatcccaggttcaaacaattctcctgcctcagccccccgagtagctgggactacaggcatgcaccatcacgcacggctaatttttgtatttttagtagagacagggtttcaccatgttggccaggctggtctcaaactcctgacttcgtgattcacctgcctcagcctcccaaagtgctaggattacaggcgtgaggcactgcacccggcccagtatccagagttttaattggagtctcattccttaggcgtgattgattgaaatcattgaccatgtgattcaacactgccatttccagccccctcatctccctggaggtcctaaaagccccaaccctctgatcacagggttgttctttctggtgaccgccccccaccctcatgttatctaggcacccccccccccacaagtcaccccgacattcctaacactcctaacaaaagcattcctgtgactcagaaagttccaagggtttttgaagctctgtgccaagaaccgggatgaagaccagatacatactttatgatcctacagtcacaaaaatcactctgaagagttgaatacccaggagtgtgagaacaacagcagcagcaacaaggatgccaccaataaaaaatgacccttgtagcaacggataaaattgcgttctgtgtgcgaagtgcttttgtggtatgcttcattgagttcctcatcacaagctgtggcgttggtggtgttattttcagatgaagaaatggagactgtaacagttgggaatcttgtggtttcatgcaccagaaccccaactcaaattggcttaactggccgggcacggttgctcacacctgtaatcccagcactttgggaggccgaggcgggtggatcacctgaggttgggagttcgagaccagcctgaccaaaatggagaaaccctgtttctactaaaaaaaaaaaaaaaaaaaaaaaatacaaaattagatggggcatggtggtgcatgcctgtaatcccagctactcgggaggctgaggcaggagaatcacttgaacctgggaggcggagcttgcagtgagccgagatcgtgccattgtactccagcctgggcaacaagagtgagactccatcttaaaaaaaacaaaaacaaaaacaaaacaaaaaaaccattgacttaaccaagattaaaggagtttgttggtacccataaccaaaaagttcagggagttggttcaggtatagctgtatcaagaagcttaagcgatgtacctgatcagtctccttcatctttattttcctctttgttggttttgttatcaggcagcttctccctcacccttcaccccatgctagcaagatggcaaaacccttagatactccagaaggaagacaatttccccttccagcatgttctagcaaaaccctcactgcactgacttaagttctgtacccaccacctctgagcccccacaggaatagaaggtggtgctcagcttggcttggatcttgtgcccatcctggatctagaagggctttggcaaccaagaactgatctcagagaccccgtgttggggaggactggttcccaaaggactcctgggggctgtgagtttgatggcatcaggctgcaggctggcaaaaccaaaggctgcccaagtcacttgccattaaacatggggtcatgttacagccgtagttgcatcacatcccacacagaacagcaaatgtcctgtctccttggagtagcaggttgaattctgccacgttggggtaactgtcagttctgccacatcaggcccatcatctcaaggtaacggcacattcttattaccacatgcattagtccatttctgcactgctataaagaatacatggaactgggtaatttataaagaaaagaggtttaattggctgacagttctgcaggctgtacgggaagcatagcagcttctgcttctggggagacctcaggaaacttacaatcgtggcggaaagcaaaggggaggtaggcacatcttacatgactgaaggaagagagaaagggggaaggtgctacatagttttgtttgtttgttttgagacagattctcactctgtcacccaggctgggctgcagtggcacaatctcggctcactgcagcctccacctcctgagttcaagcaattctcatgcctcagcctccccagtagctgggattacaggtgggcaccaccacacctggttaatttttgtatttttagtagagacggggtttcaccatgttggccaggctggtctcgaactcctggcctgaagtgatccgctcgccttggcctcccaaagtgccggaattacaggcatgagccaccatgcccggctggtgctacatacttttaaacaaccagatctcgtgagaactcactcactatacactgccaaggggtatggtgccagaccattcatgagaactccgcccaccatgatccagtcatctcccaccaggccccacctcccacattggggattacaatttgacatgagatttgggtggggacacagatccaaaacatatcgccacgataatgctatgagtcccattgctgtcacgcacagggtagatcatggtcctgcctccatgggatatggtgtgaatcccatcactgtggggtccagcaggagtcctgtcccatcactttggggtaaaatatgagtcttgtcactttggggtaaaagcaagaggacctgcaaccatagggtaatggcataattctctcacttaaggcagtggttcttttctggggacaatctggcatcctccctccccaggggacttttggcaatgttgggagactttttttttttttgagatggagtctgactgtgtctcccagctggagtgcagtggtgctatctcggctcactgcaacctctgcctcccaggttcaagcgattctcctacctcagcctcctgagtagctgagattataggcacgtgccaccacacccagctaatttttgtatttttagtagagacagggtttcaccatgttggccaggctggtcttgaactcctgacctcaggtgatctgcccgcctcggactcccaaagtgctgggattacaggcgtgagccactttgcctggcctggaggacatttttaattgccacaacttgtgggagggatgctactggcagctcgtgagtggagcctagggatgccgctcaatatcctccaatgcataggacgccacccccactaccacagtggagaattacttggccccaaatgtgaacaatgctgaggtcagaagaccttgccgtagcatgatggacttatgccatcacttgagaccctgcatagtgtgctgtcttcccaggctgatcttgaactcccaggctcaagcaaccctccctccttggcctctcaaagtgcaggaatgacaggcaggagccaccacgcccggctccagaatctacatttttaacaatcaagcgatatgtcctattgcagatcggcagactgtgttttcagaaatatcatctcaggcagaaagggccgggtgcagtggctcacacctgtaatcccagcactttgggaggccgaggcgggtggatcacttgaggtcaggagtttgagaccagcctggccaacatggtaaaaccccgtctctactcaaaaatacaaaaattagccaggcacggtggcgggcacctataatcccagctactgtggaggctgaggcaggagaatctcttgaacccagaaggcagaggttgcagtgagctgagatcgcaccactgcactccagcctgggcaacagagcgagactctgtcacacaaacacacacacacacacaaagaaataccatatcaggcagaaagatgcctgagatgtctgaaggaccttggataccgtgacacccccctcccctttctctttctctctctctctgctccgtccttagcttgctgtgcaccccatgcctgggtccctgtcccaaggtgtgccacctcctagaaggcgagaagaccatcgactcggtgacgtctgcccaggagctccgaggatgcaccgtcatcaacgggagtctgatcatcaacattcgaggaggcagtgagtgtctctgtgtgggcgtcgggggtgcctgttgggctccatgtccctctgagctgtgagcggggaagaaaagcagtgcagaccctgctgcgtgctcctacagcacttttaggatggtcgttcagtggctcccccatggatagaaccatgctgggagtctgcctcaaaacctgaaatgaacagctcagtcttggccttactaaccttgagattctcattttctactttgggagttggggcatcaggaatctgcatttacatttatttttatttttatttttatttttagagatggggtcttgctccattgcccaggctggagtacagtggggcaactctagctcactgtagcctcaaactcttgggctcatgcagtcctcctacctcagcctcccaagtagctgggagtacaggcaggtgtcactgtgccgggctaattttttttttttttaatttttttccagggccaggttctcactatgttgcccaggctggtctcaaactcctgggctcgagcaatcttcctgcctcagcctctcaaagtgcagggattacaggcatgagccaccccacctggctttggaatcgtcgtttttaacaatcaagcaatatgccctattgcagaactgcaggctgtgttttcagaaataaatctcagggccgggtgcagtggctcatgcctgtaatcccaacagtttgggaggccgaggcaggtggatcacgtgaggtgagaagtttaagaccagcctggccaacatggtgaaaccctgtctctactaaaaatacaaaaaaattagccaggcttggtggtgcgtgcctgtaatcccagctacgcaggaggctgaggcaggagaatcgtttgaactcaggaagtggaggttgcaatgagctgggatcgcgccactgcactctagcctgggcgacagagtgagactccatctcaaaaaaaaaaaaaaaaaaaaaaaaagccaggcgctgtggctcatgcctgtaatcccagcactttgggaggctgaggtgggcggatcacttgaggtcagaagtttgagaccagccaacatggtgaaaccttgtctctcctaaaaatacaaaaattagctgggcacggtggcacatgcctgtagtcctagctacttgggaggctgaggcaggagaatcacttgaacctgggaggcagaggttgcagtgagccgagatcacaccactgcactccagcctgggccatagaccaagactccatttcaaaaaaaaagaaaagaaataccatgtcaggcaaaaaggcattcctttgtttatttctttagcgaacatgtactgaatactcacagtgagtaagggaaagtccttaccttgatggatttttgcgcataagtaaatcgacagatattgtaaggtcaggttgtggtctgtgctgtgaagggaagtgcagcagggtaataggtggaatggaaatgggcaacttttccctataaagggctctttcatgaatatattcagcctggcaggccgggcagtctctgccgtaaccactcaactctgccgttgtaatatgaaaacagccatagacccatgtcagctagcaggcatggctttgttccaataaaactttatttacaaaacaggtagaatttggccagtgggctgtcatttgtcaacctctaaaatggagactaacaggggttgctatttttttttttttttgtagttttagtagagacagggtttcaccatgttggccagggtggtcttgaactcctgacctcaagtgatccacctgcctcgccctcccaaggtgctggtattacaggcatgagccaccagcaccaagctgggggttgctattttagagaagtctctggtatgggaaaggagggtttgagatgatgatggaacaagccaaggagatatatggtggaataatattctgagcaacagacgcagccagtgccaaggtcctggggcagaagtatgcttgacccatttaaggaatgctaaggacttcagattgtgttctaagcatgatgagttttgagctgggtatgtccagtcatttgcagcctgagggttatcttctcaccatggagaatcatgagaagattgaaatatgtctatagaaacccactggatattctctcctttccttagacaatctggcagctgagctagaagccaacctcggcctcattgaagaaatttcagggtatctaaaaatccgccgatcctacgctctggtgtcactttccttcttccggaagttacgtctgattcgaggagagaccttggaaattgggtacgtgggcctgattgtgtgtatggcctgagtgctaactaggaagttcgtgtattagaacaacttaaggatttttttggccaggtgtggtggctgatgcctgtaatcccagcattttaggaggccaacgtgggtgaatcacttgaggcggggagttcaagaccagcctggccaacatggtgaaaccctgtctctactaaaagtacaaaaattagccaagtgtgatagtgcatgcctgtaatcccagctacttgggaggctgaggcaggagaatagcttgaacctgggaggcagaggttgcagtgagccaagatcacactactgcactccagcctgggtgacagagtgagactctgtccaaaaaaaaaaaaagaaaagaaaaggaaaaacttaaggattttttaaaaatcaaataaaaacaaataaaaaacaaataaaagtatatctggcaaaacctcgggaaaaaagaacttggaatgtgcctaaaggtccatccagccaaaaattgtaaaagcttttttatagtcattcttgagaaacaaaagtgggagcagcccaaccttggtgcccatcctccaagggtacaggctggaatttttgctaaatttgctgtttgggctgcattgtgagtagagtttggcatgcataaaatgaacattccctcttagtcccggttgtccatcctaatttctgggatggactccatctcagtatattccagtatattccaaccttctccttgaggtcctagaaactctattagcaaaacagcagaaactcaaactagctagatcaagattgactcataggcaggaggtctgtggaagacccagattctttccatctttgtgctcctcatggtcacaagatggctgcctcagccccagcctcacatctgtagaacagacagcaaatggggaaagggacaaaaggacatgttaatcaacatgagctggtaagtgacttgagaaggtggtctaaacaatatagtttagactatattatctgtactccagcctaggcaccagagtgagaatccatctcaataaaacaaacaaacaaacaaacaaaaaccttcaatggctcctttctccttattaaggatggccacatgttcttggtcttggtctggcatgcaatatactagagggtctggtccattgcaactacagctatttcctgtcacctattggccaaaacaggctactttgctcttccctgaactcagcttaggtgcctctgtgttatcagtatttcccctatttgcagaaattggtttctgcaaaacctattcctcagtccatcacagactcaccacccctcttcaagactgagctgagcctccttcctggccatgaaaacttcctcaacttcctctgttatccacattcaacaaatatgtgttgagtatgtgccaagcaagtggagaggattaggcacgtagcactgaacaagatcaactccgagcatggccacaccatcttggagttgtagaagaccagccgttgaatgactagatgtgtgtgttttttccataggaactactccttctatgccttggacaaccagaacctaaggcagctctgggactggagcaaacacaacctcaccatcactcaggggaaactcttcttccactataaccccaaactctgcttgtcagaaatccacaagatggaagaagtttcaggaaccaaggggcgccaggagagaaacgacattgccctgaagaccaatggggaccaggcatcctgtaagtcactggtccccaacctttttggcatgagggaccggtgtagtggaagatggtttttccatggactggtggtgggtggggatggtttcagcatgattcaagtgcattacatttactatgcactttattcctattatgattacattgtaatatataatgaaagaattgtacaactcaccatcatgtagaatcaatgggaaccctgagcttgtgttcctgcaactagatggtcccagctgggggtgatgggagacagtgacagatcatcaggcattagattttcataaggagtgtgcagtctaggtacctcatgtacacagttcacaatagggttcacacccctgtgagaatctaatgccgccgctaatctgacaggaggcagaactcaggtggtcatgcaagcgatggggagtgactgtaaatacagatgaagcttcacttgctcacctatcactcacctcctgctgtacagccctgttcgtaacaggccatggataagtactggtctgtggcccaggggctggggacccctgctgtaagtggtccacaaaccagataatgtggctgtcctctctcatccatcacagtcacccccagggggtattacttccctctaacaactcactgtgtgataggctttcttactgagggcagattctgcacatttattaatattatcactatgcttactgtgccatatagtaccggatacgggatgaagtcatacaagcactgaatgaatggatgaatgaatgatggatgaatggatgacaccttcttatatgtgtatcaggctgatgctgaagacttcaaagttgagtaaaatacctatgtcagtctgcatctcctgggaagtgactgccaagttgaagttaggagtgcagaaaatgtattgagggtaatattcataaaatatgaaacagaggaagagcttcttttttttttttttttttttttgggacagagtcttgctctgtcacccagggctggagtgcagtggcgtgatcttgcctcactgcaacctccttcccctgggttcaggtaattatctcgcctcagcctccagaatagctgggattacaggcacatgccaccaagcccggctaatttttttttttgtatttttagtagagacagggttttgccatgttggccagggtggtcttgaactcctgacctcaggtgatcctcccgcctcggcctcccaaagtgctgagattacaggtgtgagtcaccacgctcagccatgaagagccttttgacaatagcgtgtgtctgacctctgtgaacagagagcgggaaggagggaggatagggctgggagagtctcagatggtgatgcatccctgagtcttggccaaacccagaaagagatcaaggccacggttgtctgcagggaagttctgcattgcaaagggacggccaggcatctaccaagctcagtcataggtgggggctgtccagggagagtcaggttttggctggaatgctacagcaggtcctgcagtttctgcagctgcaggctgcctgctgactgcacttccctgacagattctaaacagtgagctgccaagggcttctgggataccttcatggggagttagttacttatgtcaaaatgtagtgcaagggctgggcatggtggctcacgcctggaatcccagcactctgggaggccgaggcaggcagatcacttgaggtcaggagttcgagaccagcctggccaatgtggtgaaactccatctctactaaaaaaaaaaaatacaaaaactagctggacgtggtggtgggtgcctgtaatcccagctacttgagaggctgaggcatgagaattgcttaaacccggtaggtggactgcactccagccttggtgacagagcaagactgtctcaaaaaaaatgtagtgcaaggagagagagcgaggttggggtgaggtttaggagagggtttgtcttctaggcagagagaattacttagatgcgtctctccgatgtctaatgatctgcagggtctctaaactcacttggcataggtttatttgcactggagttgcacctccttccaggtcagtcttacaagtccatatgcgagacaacgttgtgtcaggacaaacatcacccttggaaatcccttcctccaataactattggccggttgtccttcttgcgcgggtacagactgcgcttattcagttgactgtctggctgagtcaagtcattggcttacgtgagtgtgagtggccaagttgcaaaactggctcttacctttgaatcttcccccattcatactcagccaggcacatggggaggagacccttaagggaatagcagcgtcacctctgccttctcacggtccctccaggaagtgtgggggtcccaggctttggtctgaaactacactgaaatagctcatttttgccttttgttttaacttttccaggtgaaaatgagttacttaaattttcttacattcggacatcttttgacaagatcttgctgagatgggagccgtactggccccccgacttccgagacctcttggggttcatgctgttctacaaagaggcgtaagtagaagagttagagagacgctgaggaggcgagggctggctggctctgtgcttgctacgtttgtgctccaatctgcccctcttgggttcctgtctatctccctcctcctcctggaataaatatcttaggttcctttttacaatctcaccagtcgatggcatgcaaagtcaatagtgtctgcttttatcaaatgcctaaaatggaagcagacagctttcccatagaagcccggactggccagtttcctggggcaatattctattttgccttgcctgtgtatgtctcatcagacatccttagtagtcaggagctcagtctactaagtggatgttatcaaatgtattgcttatctatttttcttttttatccccaattttttttttttttttgagacagagtcttgctctgttgcccagggtacagtgcagtggcagatcttggctcactgcaacctctgcctcccgggttcaagcagttctcctgcctcagtctcttgagtagctgagattatgggcatacaccatcacacgtagctaatttgtgtatttttgatagagacgggttttgccatgttggccaggctggtctcaaactcctgacctcaggtgatctgcccaccttggcctcccaaagtgctgggattacaggcatgagccaccgcacctgaccagtagtaatattaataatagttctagccctcaagatttaccttgtgccttgctgagcactgacacacagtctaatcttatcagtaacttgtgagggagctcctgctattactattattacagattgagtatccctaatctgaaaatctgaaatttataatgctccaaaatccaaagctttttgtgggccgacttgatactcaaaggagatgcttattggagcatttcagatttcagatttttagattagagatgctgaaccagtacaatgcaaattaactagtaaaatgcaaatatttcaaaaccccaaaatatccaaaatccaaaacacttctggtcccaagcatttatttatttatttatttatttatgtttttgaaacagagtctccctttgtcgcccaggctggagtgcagtggtgcgatctcagctgatgctacctctgcctcccgggttcaagcaattctcctgcctcaacctcctgaatagctgggattacaagcatctgccaccatgcccagataatttttgtatttttagtagagacggggtttcaccatgttggccaggctggtctcgaactcctgacttctggtgatccgccattctcggcctcccaaagtgctgggattacaggcgtgagccactgcacttggccaagtctcaagtgttttgaataagggatgcccaagctgtgttttttcattgagatgtcagggttgacagttcctttctctttggctgttcccgagttattttttcttgtggcattagattgttgggtgagtaacatgtgaccctatgggatgtaacttcccaggcctcatctgcacggcactcagtgtgacggtcttgtaagggtaactgccttctgctgttttgtcttgaaagcccttatcagaatgtgacggagttcgacgggcaggatgcgtgtggttccaacagttggacggtggtagacattgacccacccctgaggtccaacgaccccaaatcacagaaccacccagggtggctgatgcggggtctcaagccctggacccagtatgccatctttgtgaagaccctggtcaccttttcggatgaacgccggacctatggggccaagagtgacatcatttatgtccagacagatgccaccagtgagtgtgtcttgggaatgtgaattcgtatgtgaatcagacctcttgcttttaataggctgatgcagtgaggttgtataaaatgctccttgatatggttattggctttttttttttttttagacagggtcttactttgtcacccaggctagagtgcaatgcagtggggtgatcatggctcactgcagcctcaaactcctgggctcaagcaatccttctgcctcagcctcctaagtagaaggaactaccagagtataccaccatgtgtggcttttttttttttttttctttgagatgaagtctcactctgtcacccggactggagtgcaatggcatgatctcggctcactgcaacctccgcctcccaggttcaagtaattctcccacctcagcctcctgagtagctgggactacaggcatgcaccactatacccagctaatttttgtatttcttgtagagacagaacgttgctgtgttacccaggctggtcttgaacccctggcctcaagtgatcctcctgcctcggcctcccaaagtcctgggattagaagtgtgagccaccttgcccagtcagttattggcttttaaaggagctgggtattgaggcttatagtttcagacgaggcagtagcaacaagccacttgatgggaatatttatatttttcatcctattatgaaaaattgtcaaatattcacaacacagaacaaaaccccatagttagccgcctcccagcttcagcctttggtcatttttgtttcatctcgacgcctgttccctcttcccacttgttacttctttttgttttgttgtttgttttggcctggagtatttcacagcaatttaattatgtttgtttgtttgagatggagtctcactctgtcacccaggctggagtgcagtggcgccatctggactcactgcaacctccacctcccaggttcaagtgattctcctgcctcagcctcccaagttgctgggattacagcacacttggctaatttttgttttgttttgttttgttttttgagacagagtctcactctgtcactgaggctggagtgcagtggtgtgatctcagctcactgtaacctccccgtcccagttcaagtgattctcctgcctcagtctcccaagtagctgcaactacaggcgtgccaccacgcccagctaatttttgtatttttagtagagatgggatttcaccatgttggccaggatggtctcaatctcttgacctgcaatctgcccaccttggcctcccaaagtgctgggattacaggcataagccaccatgccagccttttttttttttttttttttttttgagatggagtttcgctcttgttgcctaggctggagtgcaatggccctatctcagctcactgcaacctctgcctcccgggttcaagcgattctcctgcctcagcctcccgagtaactgggattacatgcatgcaccaccacgattggcgaattttttttttttttttttttttgtagagacaaggtttctccatgttggtcaggctggtctcgaactccgagcctcaggtgatccgcctgcctcggcttcccaaagtgctgggattacaggcatgagccaccgcgcccagccatttttgtatttttaatagagatggggcttcaccatgttggccaggctgctctggaactcctgacctcaaatgatccgcccaccttggcctcccaaagtgctgggattacaggcatgagccactgggcccggcctaattatatttttgtaaaacctaagtgcttctcttatagcagtagttcccaaaggaggttaactgctctgccagggaacagctgccaatcaatgtctggagacatttttggttgttacagctgtggagatgaaaccactggcatttcgtgggcggaagccagagaggctgttccatgtcctgcaacacacaggatgcaccctccttcatgacaaagaattatccagtcctaaaagccaatagtactaagggtgagaaaccccgtcctgtaggctcaaattcaagcttttttttttttttttttttttttaacggagtttcactcttgtctctcaggctggagttcaatggcgcattctcagctcactgcaacctctgcccaggttcaagattctcctgcctcagcctcccaggaagctgagattacaggcgcccaccaccatgtccagctaattttttttttttttttttttttttagtagagatagggtttcaccatgttggccaggtgtagtctcgaactcctgatctcaggtgattcagatgattcgcccacctcggccttctaaagtgctgggattacaggcatgagccactgtgcctggcctcgaattcaaactttataaatcaaccctatcttcttcagttaatccccgctcattcatcctgtatcttttagtgacaccaaaagacttacagttttcagaaacttctagctcccaggtgtttggactccctccccatccccagctccctcggccacctccgttactttgggttttttgggttttgtttggttggttggtggtggttttttttttcttttttgttttgttttgttttgagacggactcttgctctgtcacccaggctggagtgcagtggcgcaatctcggctcactgcaagctccgcctcccaggttcacgccattctcctgcctcagcctcccaagtagctgggactacaggcgcccaccaccacacctggctaattttttgtatttttagtagagacggggtttcactgtgttaaccaggatggtctcgatctcctgacctcgtgatccgcctgccttggccgcccaaaatgctgggatgggtgccctcatgatgtctttaacttgtgtgtcccccgccatcctcccaccagctttctttgcacactgtttctcatgatggacccatttcctttctccctgacagacccctctgtgcccctggatccaatctcagtgtctaactcatcatcccagattattctgaagtggaaaccaccctccgaccccaatggcaacatcacccactacctggttttctgggagaggcaggcggaagacagtgagctgttcgagctggattattgcctcaaaggtgagtgcaggcagctgtgctaggatcggtggggtttgcacacgtgtgtctgatgcactttgcttcacctctagggaagcagctatctcttcctgtgtctcagtgtcggaaggcacacacacacacactccattctatctcatatgaaaacacacatacatgtttttatctatttatttatttattttattttttatttatttacttttttgagatggagtttcactcttgttgcccaggctggagtgcaatgacgcgaccttggctcatcgcaacctccacctctcgggttcaagtgattctcctgcatcagcctcccgagtagctgggattacaggcacgcgccaccacgcccggctaatttggtatttttagtagggacggggtttctccatgttggtcagcctggtctcaaactcccgacctcaggtgacctcaggtgatccacccaccttggcctcccaaagtgctgggattacaggcatgagccaccacacccggcctattttttttttttttttgagacagggtcttactctgttgcccaggctggagtgcagtggcatgatctctgctcactgcaacctccacctcccaggctcaagcaatcctcttgcctcagcctcatgagttgctggaacaccacaattgtctgcaggtgtgcaccagcatgcccaggtaatttttttttttttttttttttttgagacagggtctcactctgtcacccaggctggagtgcagtggcatgatctcggctcattgcaacttctgcctcccaggcgcaagcgattctcctgcctcaggctcctgagtagctgggactacaggcgcctgccaccacacccggctaatttttgtatttttagtagagatggggtttcaccatgttggccaggctggtcttgaactcctgacctcaaatgatccacccgcctcggcctcccaaagtgctgtgattacaggcatgagccaccacgcctggccctggctaatttttaaacttctttttgtagagatggagtctccttatattgcccaggctggtctcaaactcctggcttcaagcaattcacccccctcagcctcccaaagcgctgggattacaggcgtgagccactatgaccggctcatacatacacatttttaaacatcgtaacacaagcacgcactgaagacttgtgtcaaaaccagatttttcccatgtcttggcaccatttccctctgggattttctcctcttgtctctccttctttctccctccctgccttccttgttctcttcatccctcctcacactgatggggatgcagctgtgttaacccacgcaagacttctgtgcaaagctagaaacacaactaatggttattgacaaagtcagggaaggattttggccccactgagatcctttagttgtaaggatcgaaggcagcaagaattggttatctcatatcccccaccccatactttcaattaaaaatgtctgccaggcttggcgctcatgcctgtaatcccagcacattgggaggccaaggtgggaggatcactggaggccgggagtttgagaccagcctgggcaacatagcaagatcccatctctaaaaaaatttaaaaaaatggtggtgtacacctgtagtcccagttacttgggaggcccaggcgggaggatctcttgagcccaggagttcaagtctgcagtgagctatgattattccagtgcactccagcctgggtgacagagcgagaccctgtctctatatatataaaaaaaattatacaaaattaaaaaaaaaaggcattaagtgcattcacaatgttgtgcaatcattttattgtataaaaattataaataaaatttataaataattatataaataattttattataaaacttaatgacaaatttttcttaatcttgtttacttaatagacctccatccatctgaaggaaaatggaataatatttaaagtctcaaactagtgtgtatacattagtttaaaattattattattattattttctttttttttttttttgacacggagtctcactccgtcacccaggctggagtgcagtggcttgatcttggctcactgcaacctccgcctgctgggttcaagcgattcttgtgccttagcctcctgaatagctgggattacaggtgctgccactacaccggctaatttttgtatttttagtagagacggggtttcaccatgttggccagggtggtcttgaattcctgacctcaaatgatccacccgtctcagcctcccaaagtgctgggattacaggcgtgagccaccgcgcccagcctaaaattattttaacattgggtttttttagaacccaccaaactggagaagcatctgtcacttttttctttttctttttcttcttcttttttaagatggggtctcactctgttgtccaggctggagtgcagtggcacaatcatagctcactgcaggcttgaactcctgggctcaaacgatcttcccgcctcagcctcctgagtagctggactacacaggactacaggcctgagacactatacctggctaattatttaaaataattttttaggccgggcacagtggctcatgcctgtaatcccagcactttgggaggccgaggcgggtggatcaccaggggtcaggagtttgagaccaccctggccaatatggcaaaaccccgtctctactcaaaatacaaaaattagccaggcgtgggcctgtaatcccagctactcaggaggctgaggcagaagaatcgcttgaacccgggaggtggaggttgcaatgagccgagcttgcaccattgcactccagcctgggtaacaaaagcaaaactccatctaagaaaaataataataataaaaataataataattttttagaggtggggatcttgatatgttgcccagggtggtctcgaactcctgaccacaagcgatcctcctgcctcagcctcccaaagtgctggtattacagacctgagccactgcgctgggcccatttccttctttagttttggtttccttgtgcatcttgatgtatttttcttgagatattttctgttagtgatatcctcggtccatgaccctggaggagaaggccagggggccactggcgaggtgtggctgaggccaggagctcaacatttgctcttggctctggccctgacctgctgaagggctttggctaagttcccaagcaagtcaccgtctgcctcctttttgggagaaggggcgggaggacagatgatctctgggagctgtcccagctctaagctcatatgctatatgtatgtgtgtgacatcatccccgcctgagccgagggttgcaaacgtgatttatctgctctgatgctttatataactccagggcgagtccagtcatcagctccgctgtaagctgttggccctgcattcaagtaaccagaaccacccgtgagagctgccaccagtaatgtcactcgaagcttccttttttttttttttaattccgaaagtctaaatctgtaattaccaagggaccatttaaacatggttttatttgtaattgtcacaaagttaatatcattaaaaggaaactcactaaggacaaattctgtgtgatttcactcctaggaggtccctagagtcctcagattcatagagacagaaagtagaatggggagtgccagggactgcggaggggacgggttgaggacagagtttcagtttgggaagatgagaaagttccggagatgatggtggtgatgattgcacaacattgtgaatgcacttaataccacagaactgcacacttaaaatggttgagatttaccgggcacagtggctcacgcctgtaatcccagcacactgggaggccgaggtggggtggatcactttgaggccaggagttcgagaccagcctgggcaacatggtgaaaccccgtctctactaaaaatacaaaaattagttgggtgtggtggtgggtgcctgtaatcccagctactcaggaggctgaggcaggagaatcgcttgaatctgggaggcagaggttgcagtgagccgagatcacgccattgcactccagcctggcaacagagcaagactccaccaaaaacaaaacaaaacaaaaattgagatggtaaattggtatattttatgtgatgcttatttttccacaatttcaaacacacacacacacaaataaataagcttacaaacccttcctgttaatatcactagtgtatatgttgttaccacggtaaaatatacatcacatacaatttattattataaccatgtttaagagcacagttgagctgcattaagtgcattgccgtggttgtgcggccattaccaccatcatctccagaactttctcatcttctcaaactgaaactctgtccccatgaaacactcactccccttctccttcccccagccccagcacccaccatcctcctttctgtctctgtgaatctgattctagagacttcattatgctcatttttcttttcttttctttttatttttttgagacggagtctcgctctgtcacccaggctggagttcagtggcgtgatctcggctcactgcaagctccgcctcccgggttcacgccattctcctgcgtcagcctcccgagtagctgggactacaggcgcccgccaccacgcccggctaattttttgtattttttagtagagacggggtttcaccatgttagccaggatggtctcgatctcctgacctcgtgatctgcccaccttggcctcccaacgtgctgggattacaggcgtgagtcaccgcgcctggcccattatgcttcatttttctaatctcaggaaaaccacagtgtaccatgtttcatgcagtggattctaggaagaggtagcaggtatcaggaatgatacctgtgcctgaacaaatatcccttcctctccaaataataataataataataataataataataataataataataataccaggagcttcccttattcaggcagttctacatttttttttccatctgtaatgctgtaactagctcccatcagagttaacccaggcagggtattctatgtctatttataaacttaagaagtattttccagtctctcataggcttttaaagctgtgtaaatacttgggtttccgagtggatactcaccattcacaggaaggtacttgatacacgatttagagcttattgtctatcctcgaggcattaaggggaggagagaaaatggaatttcctttgctcagcagtcaccaggcaccaagcagagtggcagcaggggaggtggctctccagggactgttgcagattttgcttgtaaagagctgtgtccgtccatctcagtggctgtaccagaggcataactgtgcttgcaccgtgggtcacaagaaccctgggatttgacttcggggcttaagacatgaccagctgcggtacttaagtattgtaggctgggtgcgatggctcatgcctgtaatcccagcactttgggaggccaaggcgggcagatcgttcgagctcaggagtttgagatcagcctggccaacacagcaaaactctgtctctaccaaaaaaaaaaaaaaaaaatacaaaaatcggctgggcgcagtggctcacgcctgtaatcccagcactttgggaggccaaggcgggtggatcacctgaggtcgggagatcaagaccagcctggccaacatggcaaaaccccgtctctaataaaaatacaaaaaaaatgccaggcgcagtggctcaagcctataatcccagcactttgggaggctgaggcgggtggaccacctgaggtcaggagttcagaccagcctggccaacatggccaaaccccgtctctactaaaaatacaaaattagccgggcatggtggtgcacgcctgtagtcccagctacttgggaggctgaggcaggagaatggcgtgaacccgggaggcagagcttgcagtgagccgagatagcgccactgcagtccggcctgggcaacaagagcgagactccatcccaaaaaaacaaaaacaaaaaacaaacaaacaaacaaaaaattagccaggtgtgatggtgcatgcctgtaatcccagttacggggagtggagctgagacaggagaatcgcttgaacccaggaggcagaggttgcagtgagccaagattgcgccactgcactgcagcctgggcgacagagcaagaccccatctcaaaaaaaaaaaaaaaaaaaaaaaagagagaaatagtattgtattttgtatttttaggactgctacctttataagctactggtgttcttcttcatttattaatttttaaattcccttttctatgcatgtttgaaaagttccttcctctatctcctctcatgcctttaggtcagggtttctctgtcttggtgttttttctgtctggcgttggatcattctctggggtgggactgtcccgagcacttcagggtgctcagcagcatctctggtcttcacccattccatgctccaggaggacgccccagccaggtcctgacacctaaaaatatctccagatgttgcccaatgtccctagtaggagacaaaatcaccccctgggtgagaaccattcactgatcaagtctgatttctggactcatgaatggaccccttagaattccatgtggaggcccagtgtggtgacccaggcctgtaattccagcactttgggaggccgaggtgggcagatcacatgaggtcaggagttccagaccagcctggccaacatgatgaaactctgtctctgctaaaaatacaaaacattagccagggtggtggcaggcgcctgtaatcccagctacttgagaggctgaggcaggagactcacttgaatccaggaggcggaggctgcagtgagccaagatcacgccactgcactccagcctgggcgacagagcaagactgtctcaaaaaaaaaaaaaaaaaaaaaaaaaaaagaattccatatggcattctactctgccctcccatcttatttgtgtggttgattaattgattgattgatattttcatgcagctgtgacctggctccttctcctcctccttcttctccttcttctttctttttcttcttcttcaacatgatttcactctgttgcccaggctggagtgcagtggccccatctcagctcactgcagcctcgacttcccaggctcaagcaatcctcctacctcagcctcctgagtagctgggattacaggcgcacaccaccatgcctggctaatttttgtattttttggtagagacggagtttcatcttgttggccaggcttatcttgaactcctgggctcaagtgatccttccccctcagcctcccaaagttctggtattacaggcaagagccactgtacctggccccctttatctttttctaaccccctcccaccattctctctctcacccccttccagctatattggtttccagagatttttttttttttttttgagagatggaatgcttcctctgtcacccaggctggagtgcagtggcgcaatcttggctcaatgcaacctccgccttccaggttcaagtgattctcctgcctcagcctcccaagtagctgggactacaggcatgtgccaccacgtgcagctgatttttggattttttagtagagacagcgtttcactatatgttggccaggctggtctcgaactcctgacctcaagtgatcctcctgcctcggcttcccaaagtgctgggattacaggagagggccaccacgcctggccagacgttttttaatgtgccaagaaaattcctgtcctggggcctttctgctgggtttctgctatgtctgaattgctttacaccacgatatgtggatggtgctttcctttgctgaattcaggatgtctcagtggtgactttctttgagaccccttcatgaaaatggcacccgcagacacccactgttcttttaccccaacatctgacctgtgactgtgtatttatgagtttattgtagactgtaagtccactgaagacagaagcattgtctggttaccttataatcttcagtcctgtgattatggtgtcgggcagttgttgcctttttttgagacagagtctcgctgttgtcgcctaggctggagtgcaatggctcaatctcggctcactgcaacctctgcttcccgggttcaaacaatcctcctgcctcagcctcctgagtagctgggattacaggcacccaccaccacgcccggctaacttttgtattttgagtagagacggggtttcgccatgttggctaggatggtccggacctcctgacctcaggtgatctgcccgcctcggcctcccaaagtgctgggattacaggagtgagccaccgcgcccagccacctggcagtttctattaggttggtgcaaaagtaattgtgggccgggtgcagtggctcacgcctgtaatcccagcactttgggaggccaaggcgggcagatcacgaggtcaggagatcgagaccatcctggctaacacaatgaaaccccatctctactaaaaatacaacaaattagccgggcgtggcagcggccgcctgtagtcccagctactcaggaggctgaggcaggagaatgccatgaacccaagcggtggagcttgcagtgagccaagatcgcgccactgcactccagcctgggtaacagaacgagactccatctcaaaaaaaaaaaaaaaaaaaagtaattgtggttttttgccattacttttaatagcaaaagctgcaattacttatgcactaaactaataaaacatgttgacatgcacttctcagatgacactctagatacagatattttatttatttatttattatttttttgagacggagtctcgctctgtcacccaggctggagtgcagtggtgccatctcagctcactgcaacctccacctcccaggttcaagcgattctcctgcctcgacctcctgagtagctgggattacaggcatgcgccactacacctggctaatttttgtatttttagtaaagacggggtttcaccatgttggccaggctggtctcgaactcctgacctcaggtggtctgcctacctcagcctcccaaagtgctgggattacaggtgtgagctgcctggcctatttttattggttattttactttatttttagtagagacagggtttcaccacattgcccaggctggtcttgaactcctgggctcacgtgatcctcacacctcggcctccgaaagtgccaggattaagggtgtgagccactgtgctcggctatatttttaatcttttgagacagggttctactctgtcacccaggctgaagtgtaggggtgcaatcatagctcactgcagcctcgaactcctgggctcaagcgatcctctcacctgagcctcccaagtagctgggaccacaggcgtgaaccatagtgtctggcttttttccaaagcggagctcaaatctaggctctgtctcagctcagcctctctgagaaggcccccttcactgtgtgtgtgtgtggtgcgtgtgtggtgtgtgtgtggtgtgtggcgtgggtgtggtggtgtgtgtgatttgtgtggtgtgtggtgtgtgtgaagtgtgtatgtggtgtgtgtgtggtgcgtgtatggtgtgtgtggggtgtgtggtgtgtggtctgtggtgtgtggcgtgggtgtgtgtggtgtgtgtgtgatttgtgtggtgtgtgtgcggtgtgtggtgtggtgtgtgaggtgtgcatgtagtgtgtgtgtggtgcgtgtatggtgtgtgtgtggtgcgtgtgtgtggtgtgtggtgtgtgtggtgtgtgtgtggttgtgtgtttgtggtgtgtgtatgtgtggtgtgttgtgtggtgtgtgtggtgtgtggtgtgtgtgtgtggttgtgtgtttgtggtgtgtgtatgtgtggtgtgttgtgtgatgtgtgtggtgtgtgtgtgtgggggggtgtgtggtgtgtgtgtgtgtggtgtgtgtgtgtggtgtgtgtgtgtgtggggtgtgtgtgtgtgtgtatgtgtgttcagccgcagagacttgagccccccttttctgtttctttctccagggctgaagctgccctcgaggacctggtctccaccattcgagtctgaagattctcagaagcacaaccagagtgagtatgaggattcggccggcgaatgctgctcctgtccaaagacagactctcagatcctgaaggagctggaggagtcctcgtttaggaagacgtttgaggattacctgcacaacgtggttttcgtccccaggtcaggacttggcgctgggctctcttagtgggtgccaattggcttggtgttggtggaaggtcattacttagggaccgagaggtagtgggacccagagacggcagaagggtgggtggagtctgaatggagccctttcctgggtggaggaagagatcttgcagtttcgaaatttcgaggggaattttatcaggaagagcaaataatcgcacaaaaggggaaaaatggacaaaactcagcatttgcctttcttacctctcctgagctggtctccacgtgagttccaaaacaaactccgttagacgattaacatttttttttttctctctctctcttttttttttttttttgacagagtctcactctatcgtccaggctggagtgcggtggtgcgatttcagctcaccctttccgggttcgagtgattcttgtgcctcagcctcccaagtagctgggactacaggtgcgcagcaccacgcccagctaatttttatatttttagtagagacggggttttgccatgttggctaggctggtctctaacccctgacctcaggtgatctgcctgcctcggcctcccagagtgctgggattataggtgtgagccaccgtgcctggccgtgattattgaggctttagctgagcgcagtggtgtaagcctgtggtcccagctagttgggaagccgaggtggtagggttgcttgaggccagcctgggcaacataatgagaccccatcgctaccaaaaaaaaaaaaaaacagtttaaaaattagtcaggcatggtaatgcatgtctgaactcctagcccatggggaggctgagaaagaaggatcacaagaggccaggagatggaggctacgataagcgatgatggcgccactgcgctccagcctgggtgacagagtgagaccctgtctctaaaaaaaaattaaaagtatctgttcagatgtttaccaatgctattcatccgagcagacttttctcccagaaccaccagtgtgtaagaatcctcttttttttttttcttttctttttctttttttgttgcatgtttcccctatgaccctgagtccaaaagaatgttcagggggacagccaaggcttcaaagtggttactgtttcacctgttacaaacaaaatgttggctaggcacagtggctcactcgtgtaatcccagcactttgggaggccgaagtgggagaatcagttgaggccaaaggtggagaccagcctgagcaacagagtgagaccctatctctactaaaaaaggaaaaaaaaaaaaaaaatagccagacatgttggtgcatgccttgtagtcccagctactccggaggctgaggcgggagaattgctggagcacaggagttggaggctgctgtgagctatgatggcaccattgcactccagcctgggcaacagagcaagaccctgtctcaaaaaggaaggaagggaaaaaaagaaagaaagaaaggaatggagggagggagggaaagaggaaggaaggaagagagaaagaaaaagaaagaaagaaagaaagaaagaaagaaagaaagaaagaaagaaagagaaagaaagaaaggaaagagagaaagaaaggacagagaaaggaagggggcaagggagggagagaggagggaaggaaggaaggaaaaaaggaaaagaaagaaaagaaagagaaagaaaatgaaaaaaagaaggaaggaaagagaaagaaagcaaatgaaggaaggaaagagggaaaaagagagaaagaaagtaaaagaggaaagaaggaaggaaggagagagagggagagagaaaagagaaagagaaaagaaaaggagaaagaggaaagaaaccagaaagagagagagaaagaagaaagaagggaaagaaaagaaaaattctgccagacttggagaagtggctgagtcagttgtgatgtccacatgtagtcacgtttgacatcccagggccacctcagcaggccgtctctggggagaattttctctgatttcttccccttcccttgctggacccctgcacctgctggggaagatgtagctcactccgtctagcaagtgatgggagcgagtggtccagggtcaaagccagggtgcccttactcggacacatgtggcctccaagtgtcagagcccagtggtctgtctaatgaagttccctctgtcctcaaaggcgttggttttgtttccacagaaaaacctcttcaggcactggtgccgaggaccctaggtatgactcacctgtgcgacccctggtgcctgctccgcgcagggccggcggcgtgccaggcagatgcctcggagaacccaggggtttctgtggctttttgcatgcggcgggcagctgtgctggagagcagatgcttcaccaattcagaaatccaatgccttcactctgaaatgaaatctgggcatgaatgtggggagaaaccttcactaacacactcttgctaaaacatagaatcatgggagtgcttcctgggtaccccctccctgccttctgtttgcagccactgtttgctcactaaacatctctgcacctcccgcgtgcatttgcagaggtgggtgggggtccccggagtctgagctccccgcggctgggtgccccgacccagcagctcctacaccatgaatggaggttgatctggaaacagaatattttcatgaaagggcgacagggtatgaacaaaagaacaccgtgtcgctcactgaattccacggaggagagtcagggatctcttccttccttccttccttccttccttccttccttccttccttccttccttctttctttttttccttctttctttctttccttctttcttttcttttctttattccctccctctctccctccgtccgtccctccctcccttccttctttccttcttcttttttttttggatggaatttcactcttgttgcccaggctagagtgcagtggtgcgatctcggctctccacaacctccacctcccgggttcaagcaattctcctgcctcagcctcctgagtagctgggattacaggcatgcgccaccacgcccggctaatttttgtacttttagtagagacagggtttctccatgttggtcaggctggtctcgatctcccgacctcaggcgatccgcccgcctcggcctcccaaagtgctggaattacaggcgtgagccaccgcccctggccagggacgtttcttttcaacttgagtcttaagagaatgaagcagtatggtcctgggagagagaaaaagcttggagaacttgggagaaaggcaaggagatgtttacctgtcgtggcttttgggaggaacaggaggtgagactaaagaggcaagttgggaccacttggagagattttcttcctttagcagagtgtttatttatttattttttcccaggcacctgtgtggcctgatctgccctctagtggccatttgcaatactaactgtagccaagaagggtctaaaaatgtacgggcttggtccaaagcagatctcaatctcagtcctgctattaataatattcgggtggctcacgcctgtaatcccagcactttgggaggccgaggcgggcggatcatgagatcagaagatcgagaccatcctggctaacacggtgaaaccccgtcactactaaaaatacaagaaattagctgggcgtggtgacgcagctaccccaggcggggcaatcacttgaggccaggagttcgagaccagcctgaccaagatggtgaaaccccgttactacaagaaacataaaaattagccgggcgtggtgacacacgcctgtagtcccagctactcgggaggctgaggcaggagaatggcgtgaacctgggacgcggagcttgcagtgagccaagatcgtgccactgcactccagcctgggccacagagcgagactccgtctcaaaaaaaataaaaataaaataatatttggggccacagctggacttggtagctcacgcctgtaatcccaacactttgagaggcccaggcggggcaatcacttgaggccaggagttcgagaccagcctgaccaagatggtgaaaccccgttactacaagaaatataaaaattagccgggcatggtgacacacgcctgtagtcccagctacttgggaggccgaggcaggagaatcacttgatttctggaggcggaggttgcggtgagccgagatctcgccactgcattccagcctgggtgacagagcgagactctgtctcaaaaaaaaaaaaaaaaaagaataaatacataatactaataataataataaataatatttggggtcagattattctagggcactgtccaacaacactgagaagcatccctggcttccactcatctgatgccagtagtgtgtcttccccctaaagtagtaataaccaaaaatatcttcagacattgctaaatatccccctgggtgatggggtcagaaggacccttggttgagatgaccaggttagtgtgggattgctggataataaaatgctgcctaggccaggtgctgtggctcatgcctgatgcctgtaatcccagcactttgggaggcccaggcaggcagatcacctgaggtcaagagtttgaaaccagcctgggcaacatggcgaaaccccgtctctactaaaaatacaaaaattagccgggcatgatgatgcacgcctgtaatcccagctacttgggaggctgaggcaggagaatcgcttgaacccagaaattggaagttacagtgagccaagatcacaccactgcactccagcctgggcaacagagcaagactctgtctcaaaaaaaaaaatcagttgatgctttgtcttttgccacttcatggtctttttggttataatctttttggtatataaactcatttggcctgtttgatgagcccattttacatctctggttgttgagataccaatttctcagtagttactcatgaagcaccaacgtcttggttattttcacgagacccatttgtgcctgtatagaaattatctgaatcttgctaatacggacatatctttggcttgataagtggtggagctgttttcttttccattctacaatgttgttagtcttttaatacaaaaagaccataaagagaatcttaagaaatgcccccaaagtaggatttgttttctgaccacacattttctgatgacgctgcaatagaaactaaaagttaatttcaaaagattaaacagaaaacttcacttcttggtggttaaaagttaaacacttacaggctgggcgcagtgactcacacctgtaatcgcagcactttgggaggcccaggcaggcggatcacctgaggtcaggagtttgagaccagcctggccaatatggtgaaaccccttctctactaaaaatacaaaaattagccagatgtggtaacgtgcgcctgtagtcccagctactcaggagactgaggcagaagaatcacttgaacctgggaggtggaggttgcagtgagccgagatcacgccactgccctccagcctgggcaacagagcgagactctgtctaaaaaaaaaaaaagttaaaaagttaaacacttacatatctatcgggccaaagcagaaatggaaacttccattgaagtccttttggaaaataatgaaaatgtgaatatcacataccttaacttgtagaatattgtcaaagcttggctttgatgttacttagcagacttaaatggattgataaattaagaaataaactttaaactataaaactataaatgtgttaggaagggaaaagcaataacagctaagcctatggtaaacataatcaaagggaaaacacaaaccagaaggaaagaagatgacataaaactagcgtctgaagaaaattttaatgtgttaagttctttggacaatggtgcacttgctaaatttgaaagtttcagtaaggtgggaaaatttaacttgtctaaatggattcaaaaagaagcagaaaaattaagtggttatgaaccttggaaaaagatatgtgtcaaataatttcctcaaaaaagtcccttggcccagagagttttatagacacgttctttcaaattgtgagagagcaactatttcctataatagaaaaactattttagggcacagaaatctataaaagttatcccagttcattttatgaaatgaacataacacccttaaagaacttgacaaagaggttgagcatggtggctcatgcctgtaatcccagtactttgggaggctgaggtggggggcggatcacaaggtcaagagattgagaacattctggtcaacatggtgaaacactgtctctactaacaatacaaaaattagccagacatggtggcacacgcctgtaatcccagctacttgggaggctgagccaggagaatcgcttgaacctgggaggcagaggttgcagtgaaccgaggttgcgccattgcacactccagcctggcaacagagcaaaactctgtctcaaaaaaaaaaaaaaaaaaaaaagaacttgacaaagatactgcactgaacaaaagccacaggccaagctaatatgtgatgttagattcaaatgtcccaaataaaacactgcactggcaatattgtttatctccaaaatgcaaggatggtttaagatcagaagatttgataacatcatctagttcatcaagaggtgcaataaggaagatcatatctgtttcaataaccttaatttaaaattcctaacttagagaaaggggaggaaaaaaagaggcttcataaaactcataatagaatatttcttctacaagataaatattacctaggttaaaccaacagccaagctaacatcattcttaaaattattcttagcagagttaggaacaaaacaaggaagccccatctcatcattactaattaacatttctctgggcatccagccaatgtaataagacaagaaacagaaatcagagttgtaaagaatggaatgtgggaaataaagtcattgctatttgcagagcgtctagctcaagggtaggcaaactatggcccatgggctagctgcctgtttttgtaaatgaactcttattggaatgcaaccccacccacttgtttacacatcatgtagggctgctttaagctacaatgacagagtagttgtgacagaggtcatttggcttgcaaaacccaaaatatttattatctagccctttacgggaaaattttgttgacccctcttctagtgtgtcattgaaaacccaggaaagccaattatgaaactttttaaatgagttagagtttgggaaagtaggtacatagaaataagcaaaaagactgtagatacacaagcaataattagaatataaaataagggaaaagatccctttcaaaattgccgtaaaaccttagcacaactcataataaccccatctagaatgacttataaaggaacacgttttaaagtgttactgatatattaaattgtacaaataaacatgaaagcctgtttcaaatcatttaaagaaagcttactggcaaatggaaaagagtaagttgtatagcacgatacataaaaggttaatatccttaatgaataaacaacacaggagtaaggaaaacacaagaaattcatggaaaaacagacaaaagacaaggaggggacaattctttggagaatcacagagaaccaataaaggaaaaatgaagtcacactcagtaatataaagatccgcaaataacgtagtcgagtgatagcatatttttaatctcttgggttaaagatctagacaaacaaacatagaaagaaaaaaaaaaactattaaggcttaggggttgctgagattgtcctggaatgcagtctcatggcctgctggtgcaaccacaagtcaatatagagtttctggacaaccatttagctgtaggtattaagaagcttaaagagtttcttatctccctgaacctagtaatattttcctctaggaatctactttggggaagtaataagacaatcagacaatgatcaaaggaatatttataacagcaaaaaaaaaaaaaaagagccatgtgcggtggctcatgcctgtaatcctggcactttgggaggctgaggtgggcagatcacctgaggtcaggagtttgagaccagcctggccaacatggcgaaactccgtctctactaaaaatacaaaaattagctgggcatggtggcggactcctgtaatcccagctactcaggaggctgaggcaggagaatcgcatgaactcaggaggcggaggttgcagtgagccaagatcacgccgtcgcactccagcctgggcgacaagagtgaaactctgtctcaaaataaataaataaataaggaggatggttaagtgagtgacgactcacgtagcaaatggaatattttacagtcattcatcgttttccaagttttctgcagggaacacatgctacttttgtagatgatggaggaaaaccctaatattaaaaaggaaaagtcccaaaattctctcctaaaatgttatgttgaaaggaaaatatttagtaaatgcttccaatataataagtagacaaagtttacttataaaacaggcttgatcctcatcatgttcacacataatatttacagggaaaaaattgtccaaaggaagcagtgggctgtggatttatgagtgatttatattttcttttcttttttttttttttgagacagagtctcactctgtcgcccaggctggagtgcagtgacacgatctcagctcactgcaacctccgcctcccgggttcaagcaattctcttgcctcagcctcctgagtagctgggattaaagctgtgcaccatcaggctcggctaatttttgtatttttagtagagacggggtttccccatgttggccagactggtcttgaactcctaacctcaggttatctgcccgccttggcctcccaaagtactgggattataggcatgagccacctcgcccagcctacattttcttctttatccttttttctttgtattttaaaatttgttagctatcaacctttgttgtttaatatgtcttcttaagggatggggagaagtgtgccaattgcatagatgtttcttggagttaatcttcctgacctgagtgatgtgattccttttctaagaattgcagcttaatcactcaaattatacaggtgccctaagcagcaataagaaggaaaagatgtattttttcctatttaaactgatgatgtcgatcagtagcttgggccaatgagcaaatgccatttggcagggcttcctgaaaagctagactcttacgtgcttttggtgtcttatttttgtcactgaccctggctggcctatttatctgcaaaatgaaaaacctgaaatcgagcatgtcgaggggaatatcggtgtgtgtctaccattgacggtcttagaagcactcatccctcacgaggtgggcctgctctaatccttcagatgctcacaagggtatattgaaagctgctctgagtggtcattcctggcagtctgtattgtaatccatgttccccattgctgcaccctcctgcgctctgatctttcttcttaatcaagccttttattctccagtgtcacttttttaaaaaaaatgatggtgatggtgtcatcatacatgtcctactgtcgttccaggccatctcggaaacgcaggtcccttggcgatgttgggaatgtgacggtggccgtgcccacggtggcagctttccccaacacttcctcgaccagcgtgcccacgagtccggaggagcacaggccttttgagaaggtggtgaacaaggagtcgctggtcatctccggcttgcgacacttcacgggctatcgcatcgagctgcaggcttgcaaccaggacacccctgaggaacggtgcagtgtggcagcctacgtcagtgcgaggaccatgcctgaaggtagggctgctgctccggggtccgagtgtcatgggtgggacatcaaggctgaccaaggacagattctccaccctctaagcagtgcatatctgtattttaccttattggccttcatttttgtttgagacggagccttgctctgtcgcccaggctggagtacagtggtgcgacctcagctcactccagcctctgccacctatgtcaagtgattccctgcttcagcctcccaagtagctgggactacaggtgtctgccaccacgcccagctaatttttgtatttttagtagagatggggtttcaccatattgcccaggctggtcttgaactcctgggctcaagtgatccacccacatcggcctctcaaagtgctgggattacaggcatgagcaccgaacctggccttttttttttttttttttttttttgagatgaagtcttgctctgtcgcccaggctggagtacaatggcgcaatcttggctcactgcaatctccgcctccctggttcaagcaattctcctgcctcagcctcctgagtagctgggactacatgcgtgtgccaccacacctgtattttcagtagagatggttccaccatgttgcccaggctggtctccaatgcctgagctcaagtggtccgccaaccttgagctcccaaagtgctgggattacaggcatgagccaccatgccaggtcatattttaaaattatgagtcataggcaatcattatgtaaactttagaaaatacaccactgcactcccgcctgggtgacagagcaagactctgtctcaaaaaaaaaaaaaagttatacgcagaaagtaacccatttaatcttcctaacaatcttgtgggatgagttttagatgtccgttctctgacgaggaaaatgggttgtgggaaaatgacgtcaccagcccaaggttgcaccatggacaggtggcagaagtgggatctcatccaagagttacatccctgcctctcacttcctctccttacagccaaggctgatgacattgttggccctgtgacgcatgaaatctttgagaacaacgtcgtccacttgatgtggcaggagccgaaggagcccaatggtctgatcgtgctgtatgaagtgagttatcggcgatatggtgatgaggtaaggcccttgactcttgggcatgcccctgcacacttcagcatgccccttcagagttgcacttggtacctccttcctctgctgaaattttgattccagtgcttctctcatcaggtactgtgctattagtacttaaagccttgatacctgacttcgcaggaagatgggtcagaaatgccaatctaccagcttgttacttttcttagtttctcacattgctttccagctgtgtcctctaagttgaatgatgtctgcctcccaccacaacaggagactcatttcactttagaaggagttatttgagtcttaaaaccttataaattgctgggtacagtggctcacacctgtaatccaagcactttgggaggccgaggcaggcagatcacttgaggccaggagtttgagaccagcctggccaacatggtgaaaccccatctctacaaaaatacaaaaattagccaggcgtggtggtgggtgcctgtaatcccagctactcaggaggccaaggtgggaagctgaggcaggagaatcacttgaagccaggaggtggaggttgcagtgagcagagattgcaccattgcgctccagcctgggtgacagagtgagactctgtctcaaaaacagcaacaacaaaaaccttataagttactttcattagatgcttccattgagccagacaccatgcaaggtgctgggtgagtgcagagatgcacaagacatagaatccaagacaaataacccaaaagaacccaaacagttgctaagctcttcccagggctcactgtatgtcccaaacacattcagcacgttacacagagtatctcattgatcacattttattacctctaggaaattttgagaggccccattatttttatggacagctaggcaaaaaaaaaaaaagggccgttaattctaattttatttttttcgtagaatatagatcctgagtactgttaagtgtttgtaaaatgcattgcttgtaagatgcattccaatttcagaaatgccaaaatgcaaaaataatatacctcttgggactgaggaagtacaatacgtcctcacattatcccagtgagctgggtactgaggcttccagagtttaagttgctgcacaaaacctggaagaatagaatcatgatccaaatgcatgactgatatttcaatccagaaactgccaaattttttttaccataaaggtctggatagtaaacatgtttgactccgtggccagatgatttctgttacaactactcaattccaccattctactgagaaagctgccatgggtgatatgtaaatgaatggatgtggttgtgtaccaataaaactttatttacaaaaacacgtggtggaccaggtttagttggtgggccagagtttgccaacaactaacagagattacagcaaaatgtctgatttcctggaactttgagagggagtcctcctataaccaggtggacctccctctacccctcctgggaccacatctactcttggcaaccaaagattttggctttgacaataatttacaattgagatctaattctaaattattgtggcttgtgggccaaatctggcttgcagagcattgtaaagaatgtgcaacagggttgaggtcaggagttcaagaccagcctggccaacatggcgaaactccgtctctgctaaaaatacagaaattagctggacgtaatggtgggcgcctataatcccagctgctcctcgggatgctgaagcagggagaattgcttgaacccgggacgcaaaggttgcagtgagccaagatcgtgccactgcactccagcctgggcgacagaacaagactctgtctcaaaaaaaaaaaaaaaaaaaagaatacgcaacagagactatatgtggcccttcacagcttcacagaaaaagtaaactttcaaaaatagaaagtgtccttactgaacttgtcattctgggcctattttggggccctgtttgctaaatgaatggcttgatttgccttttttaacattcatttttaaaataaaattgctaaatgaatggcttgatttgccttttttaatattcatttttaaaataaaattccttatcatacagagctcagctagtttttaattggcagaaacgtgcatatgcctctaatccatattcatgagttactttcctctgccttttgatgtctctgtccacaatagcctttggaattatgatttgtagttgctagatagaatttaatctcatgattggggtatcatttatttttggggatttggattgcctctggtttttaccatgttaggtaatactaattttatctggaaaccattttagctttttggattgacagctttagttattgtttcagtcagttcttgctgcgtaacaaactgcccccaaaggtactggtttaaaacaaaggacatttattctttctctcaattctgcaggttcactgggtgattcctttgtcctgggccagtttggctggggctggatggcctcattcacatggctggggcctcagctgggggcacttggagctttgtcctcatgtgttctctcactgcccagtgagctagcccaggcaaggaaggacatgccccatatacaaacacttcttaggactctgtttgcatcacatttgctagtgtccctttggcaaagtgagcccatggctaagcccagaatgaggaagtacaatacatcctctgagtatctcagtgagctggatactgaggcttccagagtctcatagacacagaaagtcatgattccctgggggccataattgcaaagtttattaatatattatcctatatgtattaatcctgtaggtcctaaggaaataattcaaatttggggcagggaacaaagctctatgcataagattttcatcagtagcaaaatatgcaaaccactaagatgtccatccattggagaatggacacatggaagacggtgcatccatagaattggtggatgaagagccattgaaaatgatgtttgggggccaagcatggtggctcatgcctgtaattccagtgactcaggaagctgaggtgggaggattgcttgaggccaggagtttgagcctgggcaacacagccagaccccatctctgcaaaaaaaaaatttcaaaattagctaggtgtggtggtctatgcctgtagtcccatctacttgggaggctgaggagagaattgcttgagctcaggagctccaggttatagtgggctgtgactcactcactacactgcagactgggtgacagagcaagaagactctgtctccaaaaaaataagataaaatgtttgggatgacctttgttcagtgtaatgtagaagttaaaattacatgctctggagtttagttcgtttgtgttgttatcccccagcagttaagaatccccctgtatctgctgggtgcagtggctcacgcctgtaatcccagcactttgggaggctgaggcgggtggatcatgaggtcaggagatcgagaccatcctggctaacacggtgaaaccccgtctctactaaaaatacaaaaaaattagccgggcatggtggcgggcgcctgtagtcccaactacttgggaggctgaggcaggagaatggcgtgaacccaggaggtggagcttgcagtgagccgagatcacgccactgcactccagcctgggcgacagagtgagactccatctcaaaaaaaaaaaaaaagaaaaagaaaaaagaagaaaaaggaatccccctgtatccagactagcttatgatagaggaaaagcttcttagctcccagagttgaacaactgaagagcttctcacatggctggatccaggattcctttgggtcggttgcatcttttttttttttttttttttttttttgagatggagtctcactcactctgtcatcctgtcatccgggctggagtgcagtggtgcagtctcagctcactgcaacctctgcctccctgtttaagcgattctcctgcctcagcctcctgagtagctgggattacaggcacccacgaccacacccagctaatatttgtatttttaatggagacgaggtttcaccatgttggcctggctggtctcgagctcttaacctcaggtaatccacccaccttggcatcccaaagtgctgggattacaggcgtgagccaccatgcctagcctgggtcagttgcatcttaacggctcctggcagtgagcccagtagcccctggttgtccaccggtggttgtagtggttccaaacctcatttctttgcagtgccaaacccagaggaagacagagtgcatcccagcattcccagctagactgaggtcatgtgacatccagtgcccaatcatgtgaccagaggaatgctgtatgctgattggcttgggcatgagggattttttttttttttttaatttagaaacagctttattgagctgtaacttacataccataatattcactcccaccacatgctagagagaattttgtaaatggagtaaaattacactccaacagtataaattgtgcacataaaaataaagttttaggccaggagcagtggctcacgcctgtaatcctagtaccttcagaggccatggtgggtggatcacctgaggtcagggttcaagaccagcctggccagcatggtgaaacttcgtatctactaaaaatacaaaaattagccgggcgtggtggtgcacgcctgtaatcccaactactcgggaggctaagacaagagaatcacttgaacccgggaggcagaggttgcagtgattccgagatcacaccactgcactccagcctgggtgacagagtgagacaccatctcaatatatatatatatatatatgtaaataaataaataaagttttacatcactttttttcttgatcaaagcaatgctaggtaattaaggacattgttggcaataacagaaatgtgtctatgaaaaggttcttaagaaggtgactgtaacctcacattctcctttcattttctcccccatctctgcttctctctagggtgaacacagttggtctgggtgggattggggttgtgctgtgtggggcagaggctgttggggattcgtgatgggaattcctaatagtgacccttgggtcccaggaacaggagacacgggccagtcaaaggcatgggaagaagctaggagaagttaggattcgagttaaatccagtgccaacagggtgaccagttgtctaggtttagccaggactgagggctccctgggatgtgagattttcaatgtccacactcagaaagttctgggcaaatggggacaagttggacacagaagcagaaaaaaaatcaaggagggtctgcagtggaaacgggcattgttcactctgcagaatctgtattcttgctgtcaacaatgccccgaacttcctctggaatctgctcctcacccttgagtggctctcacctcccactctcaaccccagcctggtaccagggcaaaacacaaaactcagccccaaattagccatgacaaaaatgcaaatcaagaccacgatgcaataccacttcatgcccacgagcgtggcaaaaaacaaacagacggacaataacaagtgtcggtgaggatgaggagaaatcggaaccctcatacattgctggtgggaacataaaatggcacagctgctttaggaaagagtttggcatttctttcattctttcttttttttttttgagatggagtctatctctgtagcccaggctacggtgcattggtacgatcttggctcactgcaacctccgcttcctgggttcaagtgattctcctccctcagcctcttgagtatctgggactacaggaacccacgacctcgcccggctaatttttgtcttttagtagagacgaggtttcaccatgttggtcaggctggtctcaaactcctgacctcgtgatctgcccgcctcggccttccaaagtgctgggattataggcgtgaaccaccgtgcccagctggtggaaggtattttttttttcttttgctagtttcataaacaaagccacctctagctatttaattgcattttcagtatctcccgttaaaaaaattttttttttcagagacagagtcatggtgtgtcacccaggcccgccatccgccaccatgcccagataatttttttttttttttcaaacagagtcttgctttgttgcccaggctggagtctcgctttgtggcacacgcctataatcccagttactcaggaggctgaggcaggagaatcgcttgaactcgggaggcggaggtcgcagtgagccaagatcatgccactgcactccagcctgggtgacaagagcgaaactccgtctccaaaaaaaaaaaaaaaaaaaaaaaaaaagaagatgcatttcccctttgtcctggatagcagctaccttgggtttctatatttgcttatttgtccctctctactcggtgactcattccacttggaagaaactttggactggagttccctgcccccacccctgccaccagactgatttgttttcttgctgttattgtcacacgataagcatggggttgttggctttttttttttttttttttttaacatttctttctcttctccactctccacccccctcctaaatgttccagcccggttctctgcatgcactattagcttggaactgtgtcgaaaacttttcagagttttgggctcgatgcttgcaggtttcatggtcttattcccaagagcctcctgtctcttctcataagttctggaattatctctagttacgtgcttatcacagggtatgtttcccactttgcaaatctccatttgggtggatcccaactgttttatttatttatttattattttattttatgtgtttatttttgaggcaaagtataccacattttctttttctttttgagacagtcttgctctgttgcccaggctggagtgcagtgtcacgatctcgactcactacaaactctgcctcccgggttcaagtgattctcctgcctcagcctctcgagtagctgggattacaggcgcacaccaccacaactggctaatttttgtatttttagtggagacggggtttcaccatgttggcaaggatggtctcaatctcttgacctcgtgatctgcccgccttggcccctgaaagtgctggaattacaggcatgagccaccgtgcccgggcttcaactgtttttataatgattaaaaaaaaaaaaatcgaaaggcagcaccgtggcaaagaaagagcttttttatttgtccttagacattaagcacatttatccatttggttctgatgtgacagaggctgggagttgcagggaaaggcaggaaatctggcataggccctgcagatccttcatttccactcttttctaattttgctggatacatggcaaaaatattctgcagtggtcttaaggagaagttctagagccagacagttctctttttttagtttctttctttttatttatttattttttttgagatggagtcttgctctgtcacccaggctggacttaagtggcgcgatctcggctcactacaagctccgcctcccgggttcacgccattctcctgcctcagcctcccaagtagctgtagagccagacagttctgagttcaagagctggccctgccactttgcagctatgagatctcggacaaaccatataatctcttaaaccaggggtcagtcagtaagctatatcccataggctaaatgtggcctgctgcctgatttctaatgatttgtgagctaggagtcacttttgcattttatttatttatgtatttatttttgagatggagtcttgctctgtcacccaggctggagtgcagtggcacaatcttggctcactgcaacctccacctcctgggttcaagtaattctcctgtctcaccctccaagtagctgggattacaggcgtgtgccgccatgcccagctaatttttgtattttgggtagaggtgggggtttcaccatcttgaccaggctggtctcgaactcctgacctcaggtgatccgcccacctcggcctcccaaagtattgggattacaggcatgagccaccacgccctgcccacttttgcattttaaaatgattaaaggaaaaacaaggagagacgtgaaccaaagggtgcaaagtttcagatgggaggaatacgttctaggaatccactgctctgtagatgaatggtgactatagctaataacacatattgcaaaatggctagaagaatagattttaaatgttctcacaacaaagaaataagtacatgaagtgatgaggatttaattagcttgttttaatcattccacaatttatactgtaacataactttacactgtaccccatacgtgtacacaactattatttttatttttgtttatttattttagagacagggtctagctctgtcacccaggctggagtacggtggagccttcatagctcactgcacccttgacctcctgggctcaagtgattcttccgccttagcctcctgagtagctgggactacaggtgcgaaccatcgtgcccggctaattgttctattttctgtggaaatggggtctggctatgttgcccaggttggtctctaactcctgggctccagcaatcctcccttcacggcctcccatagggctgggattacaggcacgagccactgtgcctgacctataatactgttgtcaattaaaaataaaacaaatgatttttagaaagataatattatggaaattaatattaatagaaaatagataatagggctgggagctgtggctcacgcctgtaatctcagcactttgggaggccgaggtgggcggatcacttgaggtcaggagtttgagaccagcctggccaacatggtaaaaccctgtctttactgaaaatacaaaattaggcaggcgcggtggtgagcgcctgtaatcccagctactcgggaggctgaggcaggagaatcacttgaacccgggaggcagaggttgcagtgagccgagattaagccattgcgctccagcctgggcaacaagagtgaaactccgtctggaaaaaaaaaaaaaaggaaaagaaaagaaaccatcagggtttaatgctcagcttctggcttaggaagtctggctcttaccgataatgataacctctgcatatatctttatccatagcactatggttataaaattctgcaattctcaaagtcgcttatgtgtcttagtctgtgctttgctgccttggcgtcatttctgagcaggatcctggctgtgagctccctgcgaggggtggacactcccagatgtgcaaagctcagccaccctccttctcctcctctcttcctcccaggagctgcatctctgcgtctcccgcaagcacttcgctctggaacggggctgcaggctgcgtgggctgtcaccggggaactacagcgtgcgaatccgggccacctcccttgcgggcaacggctcttggacggaacccacctatttctacgtgacagactattgtaagtctccatggcagcctcagctgactggggctgtgcttagcactgagcatggtgggacattgcaggggatgacttggagaggccgcaggtgctggccctggccttgactctcaggcctatcagctgctgcggtgcttgccctctttgatcctgcactttttttttttttgagatggaggcttgctttggagtgcactggcacaatctcagctcactgtagcctccgcctcccgggttcaagtgattctcccacctcagcctcacagtagctgggactacaggtgcccaccaccacgcccggctaattcttgtatttttagtagagatggcatttcaccatgttggccaggctggtctcaaactcctgacctcaagtgatccacccgcctcggcctcccaaagtgctggaattacaggcatgagccaccatgcctggcctgatcctgcacttaaaaaaaaaaaaaaaagtttcagaggtacctgtgcagttcattatataagtaaattgtggctgggcacggtggctcacacctgtaatcccagcactttgggaggccgaggcgggcagatcacaaggtcaggagatcgagaccatcctggccaacatggtgaaaccccatctctactaaaaatacaaaaataaattagccaggcatggtggcgggcgcctgtagtcccagctactcaggaggctgaggcaggagcctcaggaacccgggaagcagagcttgcagtgaaccgagatcgtgccactgcactccagcctgggcaacacagtgagactctgtctcaaaaaataaaataaaataagtaaattgggtgttgttgggggtttgctgtacagataattttgtcacccatgtaatcagcatagtacctgataggtcgttttttgatcctttccctcttctcacccaccactctcaagtaggcacctgtgttagtctgtacttacactgcaataaagaaatacctggccgggcacagtggctcacacctgtaatcccagcactttgggaggccgaggtgggcggatcacttgaggtcaggagttcgagaccagcctgaccaacatggtgaaaccccatctctacccaaaaatacaaaaattagctgggcatagtggtgtgcacccgcagtcccagctactcaggaggctgaggcaggagaatcacttgaacccgggaggcggaggttgcagtgagccgacatcacgccactgcactccagcctgggtgacagagtgagactctgtctcaaaaaataaaaaagaaagaaagagtgaaagagagagagaagaaaaagaaaaagaaagaaaaggaaagaaagagagaaaaagagagataaaagaaagaaaaagaaagaagagaagagagagaggaagaggaagaggtctgagactgggactcagtaatttataaagaaaagaggtttaattggctcccagttctgcaggcagtacaggaaccatgatgctggcatctgctcagcttctgaggaagcctcaagaaactttcaatcatggtggaaggtgaagtgggagcaaggtgttaagacggggagatggtgctacacacttcttaaacaaccagatcccatgagaacccacttattatacagtacccagtagggatgttgctaacccattagaaaccgcctccatgatccaatcacctcccacccggccactcctccaacattggggattacatttcaacaagagctttgggtggggacacagatccaaaccatagcagtcccggtgtctactgttcacttctttctgtccatgtgtggtcagtgtctcactctcacttatgggtgagaacatgaggtagttggttttctgtccctgtgttaattcagttaggataatcacctccagctccattcatgttgctgcaaagaacatgatctcattctttttcatggctgtgtagtattccatggtgtgtatgtatcacattttctttatctggcaatcctgcacttcctcatctgtacatggagataataacagaaccacttcaggaggtggagggacattttaatgacacaaatgttaagtgcctggcacctgttgctagtgtctccatctttgttactagagttttttggctagatgaggtggctcacacctgtaatcccagaactttgggaggctgaggcaacaggattgcttgaggacaggcattagagaccagcctgagcaacatagcgagactctgtctccacaaaaaaatacaaaaattagccagctatggtggtgcatgcttgtaatcccaggtacttgggaggctgagacagggggatcacttgggcccaggaatttgaggttgcggtgaactgtgattgtgccactgtactccagcctgggtgacagagtaagaccctgtctctaaaaaataaaaattaaaagaagtttacatctgtcaaaagtcatgctgggatcgggactagctatgtaatttgcaagacccagtgaacaatgaaaatgcagaactccttgctttaaaattattaagaatttggccgggcacgttggctcacgcctgtcatcccagtactttcggaggctgaggcgggaggatcacctgaggtcaggagtttgaggccagcctggccagcaaggtgaaaccctgtctctattaaaaatacaaaaattagccgggtgtggtggtgcatgcctgtagtcccagctacttgggaggctgaggcaggagaatcacttgaacccgaaaggaggaggttccagtgagccgagatcgtgccactgaactctagcctgggtgtcagagcaagactctgtcacaaaaataagtaaataaataaaaattaaaataaaatgaataagcatttcagaggggcaacagcagagcattaaactgacagaaaagggtcctgcatccactgcctgagatgtgggagggatggaaatgagcagtgatttggggcaggggtggggaagagtgtgcttccagaatactgacctctgagcccactgcctggtcccactgcacctacgggactgtttcgggactgctggaaaatcaggatgtggaagagcagcagagaggtttatggacaagggagggaaggaacagggtggcccacccattccaggagtggatgtgatttttgatgtgaactttgttggaaacacattgatatgaaacatatattttcttattctatttcagtagacgtcccgtcaaatattgcaaaaattatcatcggccccctcatctttgtctttctcttcagtgttgtgattggaagtatttatctattcctgagaaagaggtgagttcagtgagttcagtggtgtgctgggaacagttggttctctgggggaaaacatgccttgatataggtataggcatatttaagtttattatgaattttgctgatataggatgtgtaacatgcaatttacagataattgtcataatatgatatacacaactctttattgtaaattccctctagacagttgattctcacagaatgtttttattgatttttttttttgcccaaacctttatatccgaagctaacctattattgcaattgataaacaagtaaagctccaatgtgaatgttgattaatttttcaaaatttacattaaggagtaggacttgactgggcacagtggctcacacctgtaatgctagcactttgggaggccaaggcgggtgaatcacctgaggtcaggagtttgagaccagcctggccaacatggtgaaacctcgtctctactaaaaatactaaaaaattaaccgggcatggtggtgggcgcctgtaatcccagctactcaggaggctgaggcaggagaattactgaaccctggtggcggaggttgcagtgagctgaaatcgcaccattgcattctagcctgggcgacagagggagactccgtctcgggaaaaaaaaaaaaagtaggacaaaactgaaataagacatatatgttcatcagtgatatgagtgacgtctttgctgagtcagatggtaatttttaaatatcagaagaacattttgtgccacatgcaacatcacagttgcagacatgacacgcttttaagtttaatctacatgattaaacatttttctcagctgggcacggtggctcacacctgtaatcccaacactttgggaggccgaggcgggcggatcatgaggtcaggagttcgagaccagcctgaccaacatggtgaaaccccgtctctactaaaaatacaaaaattagcaaggtgtggtgatgtgcgcctgtaatcccagcttctcaggaggctgaggcaggagaatcgcttgaacccaggaggcagaggttgcagtgagccgagatcgcaccattgcactccagcctgggcaacagagtgagactttgtctcaaaaacaaaacaaaacaaaaaaatatttttctcatcactttctcaagcctggacaaacaacagaacaacaaatccagtcctgagttatagcatttgccagtttctgtaatgtaaatattcccaggatgtctaaattcaagctgtagacataatattactgagtgcagtgttagaaagagatacataatagctccccattgaatccaccctatggatacaatatggtgtataaatgatataatgtaaataacctcaactgcattgatcatatttaaatgtagtatgagagttaggaagtgatgagttttgaacatgtattgtctttgcttttaggataatttatttaattgtaagcctctataatttatattttttgttctatttggaaggcattgtacaatttaatctttaatgatgcttgtatttaacaactggctcactagtttcctgaaaatttaataattgtttctcatcagtcgggatgagctcgctctagaacagtactgggtgagtggcttttaagtgttacatggatggccataaattatttaaaaagccagccagagccctgcatggtcgtgcatatctgtagtcccagccgctcgggaggatgaggcaggaggatcacttgagaccaagagttcaagaccagcctgggcaacatagtgagaccctgtctatatgaaattttacaaattagccaggtgtggtggtgagcacctgtattcccagctattcagaaagctgaagtgggaggatctctggagcccagaaggttaagactgcagtgagctatgattataccactgccctccagccacaacagagcaagactgcaactctgaaatgtaaaaacaaaaacaaaaacaaaacaaaaaaaaaaccacccagggagggatgagtgctcccatgttgatgcacttacatacctgtctgatgggcttccattcaaaacataaaggtcccccatccctgccctagactgcatctaggattatggggattctgctggtaagggctgccatttgccttggggagtcttgtatgaaacacctttctgcagagtcccatgagaatctcaagctaacgtgcctcgttttcctcctccaggcagccagatgggccgctgggaccgctttacgcttcttcaaaccctgagtatctcagtgccagtgatggtgagtaccatcccttccctgtgggtggccagaaccctactcatcagcttcctttgccttcaccattgagtgagagtgaaggatgggttccccagggaggccaagaaaagccctcttattcatttgagcttgccaaactgcccttgctgcagaaacctcattactgtgtgcatctggacacatggtatttggcacctgcctgaatgggctcatctagccggtctgggacccttgggcagggtcgaccacttgggctgggctcagctgggcagttcttctggtcttgcctggcttcacccatgtagctacattttgctggtgtgtcagctagcactcggtagtcttagatgatttcactcacatgtctggtggtcagtaggctgggtggtcccaaggtgggggccctaagctgggggaggctgagcctcactctgtccatctagcctcttaggctccagcaggctggctcaggcttcattccatggtcctctgttggttcctagtagaaagctccagggcaagctccagggcaacagtccattccaaatctctgcttggacaattcttgttgattcccattgaccaaaataactcacaaggccatgcccagggccaaggggtggtgagatagactccaccttttcatgggaagagctccaagtatcctggctttttttttccccaacctattacaacctgtcttccatccccttggcactttgcagaaacagtagtctcaggtgggaagtagcatcattccatagcaagggtctgaaatcagacaagaaggatggggatgcaggtttgcctcaggacatattggccaggatcttggaccagttgtggctccttccttgagtctctgccatgccctctccatgggtgcagatgcctgtcctgttctcggccatatgcccagtgcccggcatgggtcctggatcacagaactcatttcatgagtgttttcgagggggtttgggtgagggcttgggtggaaggtggctgcagacccccaagggatcctccaaggatgctgtgtagataagtaagaagtagtgtttccatgctctgtgtacgtgccggacgagtgggaggtgtctcgagagaagatcaccctccttcgagagctggggcagggctccttcggcatggtgtatgagggcaatgccagggacatcatcaagggtgaggcagagacccgcgtggcggtgaagacggtcaacgagtcagccagtctccgagagcggattgagttcctcaatgaggcctcggtcatgaagggcttcacctgccatcacgtggtgagtccagtgggggtgggacatgggctggctttcctgacccttccctttctctgcctcctcctcctgcacagagcgacagaggacacagggtgtaacctcctacccacccctcactccactaagcttcccatcctagaggtgtgaggagggatcattcccttctcaaatcccatcctctcccacttcgcctggaaccagactctatcactgtctcatcactttctggaatgtttcattgctttccagaatctttcatcactttctggaatcttccatcattttctggaatcttccaccactttccggaatcttccatcattttccacaatcttccattgctttttagactcttccatttcttgctttttcctggcacctttgtaacccaggaccacatagaggtccacctgataccacctgccctcgttcctactctcctttgaaggcagcaccaactcttcctgcctttctgctcctttgttcctctttgagtcctatgtgctttcatccttgccacacatatttatggggcatttaaagccctgctcttgtccctgtgatacagtggatacctgcccctgtagagcttccaaaacagcaggcggagacagactccaaaacctttatttttattttatttcatatatatatatatatatatatatatatatatatatatatatatatatattttttttttttttttttttttttttttttttttttttttttttttttcctgaaacggagtctcgctttgttgtgcaggctggagtgcagtggcacaatctcagctcactgcaagctccacctcctggattcacactattctcctgcctcagcctcccgagtagctgggactacaggcgcctgctaccacgcctggctgattgttttttttttttttttttgagatggagtctcactctgtcacccaggctggagtgcagtggcatgatctcagctcactgcaacctctgcctgctggattcaagcaattatcctgcctcagcctcccgagtagctgggactgcaggtgcctgccaccacgcccagctaatgctttttatacttttttttattagagacggggtttcaccatgctggccaggctggtcttgaactcctgacctcgtgatccacccgccttggcctcccaaagtgctgggattacaggcgtgagccaccacgcccagtgcctggctaatttttttgtattttcagtagagacggggtttcactgtgttagccaggatggtctcgatctcctgacctcatgatccgcctgccttggcctcccaaagtgctgggattacaggcgtgagccaccacgcccagcctatttttatatatttttaagacagagtctctctctgtcgcccagagtggagtgcagtggcacaatctcggctcactgcaacctctgcctcccaggttcaagcaattctcctgccgcggcctcctgagtagctgggataacaggagcccaccaccacacccagctaatttttgtatttttagtagagatggggtttcgccatgttggccaggctggtctcgaactcctgaattcaggtgatccaccggcctcagcctcccaaagtgctgggattacaggcataagccaccacccccagctgactccaaaccctttatacattaggagcaaatgctatggaaacatgaagaaagggaggaaaggagggttggacaggggtgtatttgagcaaagacttagaggacatgaggagctgggccctgtggatgtggcagggaacagagagccaggcagagggaatgattaaaatacaaaggcctggctgggtgcagtggctataatcccagcactttgggaggctgaggcaggcggatcaccagaggtcaggagttcaagaccagcctgaccaacatggagaaatcctgtctctactaaaaatacaaaaattagccgggtgtggaggcgggcacctgtaaccccagctactcgggagactgaggcaggagaattgcttgaacccgggaggcaaaggttgcagtgagccgagatcacgccactgcactctagcctgggtaacagcaagattccgtctcgaaaattaaaaaaaaaaaaatacaaaggcctatctgtctgctgtccgggcaggtatgtctgctctcctagaccagggctgagcacgctgcatccaggccacagggtgctgtgtgtgacatagacaccagggagggaggagaaccctggtgagtcgaatcacggaccctcctccaagaaccctggttgcttgctctgcaggtgcgcctcctgggagtggtgtccaagggccagcccacgctggtggtgatggagctgatggctcacggagacctgaagagctacctccgttctctgcggccagaggctgaggtaagctgcttcgggggacccagcggggtactcggtggagcacccgctcctggcctcctcggatcccagtgctgctgaaacaccaaccccgtgtttctgttttagaataatcctggccgccctccccctacccttcaagagatgattcagatggcggcagagattgctgacgggatggcctacctgaacgccaagaagtttgtgcatcgggacctggcagcgagaaactgcatggtcgcccatgattttactgtcaaaattggaggttcgtctggctttctgctttgaaaacataacgacccaggccaggtttgatttcagaaggaagttgtctataatgagccgttaagtcttttctgataatataaaggggcaagatacttcttttttttttgtggggttttttttgttttgttttgtctttttgtttttgagacggagtcttactctgtctgttgcccaggctggagtgcagtggtgtgatctcagctcactgcaacctccacctcccaggttcaagtgattcacctgcctcagccttccaagtagctgggactacaggtgtgcgccaccatgcctggctaatttttgtatttttagtggagatggggtttcatccatgttggccaggatagtcttgatctcctgacctcgtgatcctcctgcctcggcctcccaaagtgctgggattacaggcgtgagccactgcaccggctttttttttttttcttttttctgacatggagtcttgctctgtcgcccaggctggagtgcagtgacaggatctcggctcactgaacctccacctcttgggttcaagcgattctcctgcctcagcctcctgagtagctaggattacaggcgtgcgccaccacacccagctactttttgtatttttagtagagacggagtttcactgtgttggccaagatggtctcaaactcctgacctcatatgatccacctgtgttggcctcccaaagcactgggattacaggcatgagccactgtgcctggctgggcaagattttggatggggaccccccaccagctgtcatttaattgcatgtattgataaactcacttacccattcacttctttaaaagatatgtttgtaggaccgggggtcccgcctgtaatctcagtgctttggaagtccaatgtgtaaagactgcttgagtccaggagtttgagaccagcctgggcaacatagtgagactccatctccttgaaaagattttttaaaaagtggggtgtggtggtgcacacctgtggtcccagctactcaggaggctggggtgggaggattgcttgagcccaggaggtggaggctgcagtgagctgtgacagcatcactgcactccagcctgggtgacagtgagacgctatttcaaaaaacaaataaaaaaggaatatagaggggaccagagcagcgtgagatgtgaggatgaggagagaggcagaaaccagacccagaaggaccttgcgtgtcacagcaagtcatctcgacattatcttacattagcaaggggcagcaggaagtgatatgattctatttatgactcaaaaagacatctcctggccaggtgcggtggctcacccctgtaatcccagcactttgggaggctgaggtgggtagattacctgagatcaggagttcgagaccagcctggtcaacacggtgaaaccctgtctctactcaaaatacaaaacattagctagacatggtggcagacagctgtaatcctagctactcaggaggctgaggcaagagaattgcttgaatcagggaggtagaggttgcagtgagccaagattgcaccactgcactccagcctggaggacagagtgaggctccatatcaaagaaaaaaaaaaagaaaaatgtagcttctttgtgatttggtaccttcttttccctccctttaaacagtagcccatcttcccccttcacttccccatgcgtaccctcagaatccattcttactggatttggccaccacccaggtgagcgcagacgtgggccaggtgaacccctcttagggctctgtgagaggtggggcagtcaaggtggcagatgctaggaccaaggctgaaggttaagagcgtgtgaaccttttgtgttgtcagactttggaatgaccagagacatctatgaaacggattactaccggaaagggggcaagggtctgctccctgtacggtggatggcaccggagtccctgaaggatggggtcttcaccacttcttctgacatgtggtgagttgtgtgtggatgggtggatggacgctgggcttgaattccaggtgctagtgagagccaagagcgggggaaggaagcctgccatcctcctggacgccccatcaaggaaaggaaggcagcgtcctgtcttaggatcttcccacggctactcttatgtcctgactaatcctgtaggcattgtgaaccccgaaaatctgagacaggtctcagttaatttaggaagtttattttgccaaggttgaggacgtgtgcccgtggcacagcctcaggtggtcctgaggacaggtgcccaaggtggtcagagcacagtttggttttatacattttagggagacatgagacatcagtcaacatatataagatgaacattggttcggtctggaaagacgagacaactcgaagtggggagggagcttccaggttgtaggtagataagagacaaatggttgcattcttttgagtttctgatgcgcctctccaaaggagccaatcagatatgcaggtatctcagtgagcagagtggggactctgaatagaatgggaagcaggtttgtccaagcagttcctagctggactttttccttgagtttagtgatttgggagccccaaattgattttcctttcacagcatttatgaactgcagcatgaattgttttattaagtggctaaccatgttctagaaaccaagagatgtgtttgtgtgtgtgtttgtgtgtgtatgtgtgtgcatatgtgtgtttgtgtgtgtttgcatgtgtgtgcgtgtgtgtgtttgggtgtgtgtgtttgtgtgtgtatatgtgtttgtgtgtttgcatatttgtgtgtgcatgtgtgcgcatgcgtgtttgtgtgtatttgcatgtgtgtgcacgtgtatgtgcgtgtgtgtttgcatgtgtgtgtttgcatgtatgtgttggcatgtgtgtttgcgtgtgtgtgtgcgtttgcgtgtgtgtgtttgcgcgcgcgcgtgtgtgtgtgtgtctaaatggcttctttgttactactatcaactgtcatcggcaggtcctttggcgtggtcctttgggaaatcaccagcttggcagaacagccttaccaaggcctgtctaatgaacaggtgttgaaatttgtcatggatggagggtatctggatcaacccgacaactgtccagagagagtgtaagtgtagaaagggtttaaggtgtgtgaggtgttcgttgaaagggtattgccctttacacgtgtgcttggttttgcctttcctatgtctacacgctcaccgtgtttgcatgctgtatgttacaggtgtgtttgtgtttgcatagcttgtctttacatgcatgcttgcatttgcatattgcattgtggtacacacacttgagttcccatatgtgctacatgtacgcttacgtttgcatattatatatttacataggtatttatgtttgcatattatatgtttctgtgtgcatcagcatatcatggcacatgtacacctcatttacatattataagcacacatgtttacatattatgtctttacctgcctgcttgtgttcacaaatcatatgattttcttgcatattgtatctttggaaggttgcacaaaacacctatagcggtagttatcttgggagaagggaactggagacctggggttgggggagagagacctgtttgcctgttaatttttttttttttttttttttttttgagacggaatcttgctctgtcacccaggctggagtgcagtggtgcgagctcggctgacttcaagctccgcctcccgggttcacaccattctcttgcctcagcctcccgagtagctaggactacaggcacccaccaccgcgcctggctaatttttttttttttttgtatttttagtagaaatggggtttcaccgtggtctcgatctcctgacctcgtgatccacccaccttggcttcccaaagtgctgggattacagccgcctgttaattctttatacacttaaaattttgtcaggtagctgggcatgggtggctcacgcctgtaatcccaagcaatttgggagaccgaggtgaacgatcacctaaggtcaggagttcaagaccagcctggccaacatggtgaaaccccgcctctattaaaaatataaaaattacccaggcgcggtcgtgggcgcctgtaatcccagctactcaggaggctgaggcaggagaattgcttgaatcggggaggcagaggttgcagtgagcagagactgcaccattgcactgcagcatgggtgacagagtgagattctgtctcaaaaacaaacacagacacacaaaaattttgtcaggcatacatattatatattcccccctccaaatatatatgcatatgtacatatatatatatttagatgaagtctcgctgtgtcacccaggctggtagagcgcagtggcacaatcacagctcactgcaaccttgaactcctggactcagcctcctggctcaacctcccaaagtgctgggattactcttgagccagttttgaaatgaggaatcccttttcaaaaccatctttcaggctggacaggatggctcatgcctggaacctcagcactttgggaggttgaggcaggaggatggcttgagcccaggagttcaaggctgcaatgagctatgattgcgccactgcactccatcctgggtgacaaagtgagaaaccctgtctcaaaaaaaaaaaaaagcggccaggcatggtggctaacacctgtaatcccagcaccttgggaggccaaggtgggtggatcatttgagcctaggagtttgaggccagcctgggcaacatagcaaaaccctgtctctgcaaaaaatacaaaaattagctaggcatggtggtgcacacctgtggtcccagctacttgggaggccaaggtgagaggattgctcgagcctaggaggcagaggctgcagtgagctatgatcatgccactgcactccagcctgggtgacagaatgagacgctgtgtccaaaataagaagaagaaaagcaaaaagaaaacaccatctctcagcacctctagcaatgctatttctgccttgacaattgtccacacacacagccagcatctgatgtgagcacatgtggtccgtgggtgtcggctgcagggacaagagtgggggtttgggaggatgcgtggcagggcccccagactcacccaggacgtgtccttctgccccgcagcactgacctcatgcgcatgtgctggcaattcaaccccaagatgaggccaaccttcctggagattgtcaacctgctcaaggacgacctgcaccccagctttccagaggtgtcgttcttccacagcgaggagaacaaggctcccgagagtgaggagctggagatggagtttgaggacatggagaatgtgcccctggaccgttcctcgcactgtcagagggaggaggcggggggccgggatggagggtcctcgctgggtttcaagcggagctacgaggaacacatcccttacacacacatgaacggaggcaagaaaaacgggcggattctgaccttgcctcggtccaatccttcctaacagtgcctaccgtggcgggggcgggcaggggttcccattttcgctttcctctggtttgaaagcctctggaaaactcaggattctcacgactctaccatgtccaatggagttcagagatcgttcctatacatttctgttcatcttaaggtggactcgtttggttaccaatttaactagtcctgcagaggatttaactgtgaacctggagggcaaggggtttccacagttgctgctcctttggggcaacgacggtttcaaaccaggattttgtgttttttcgttccccccacccgcccccagcagatggaaagaaagcacctgtttttacaaattctttttttttttttttttttttgctggtgtctgagcttcagtataaaagacaaaacttcctgtttgtggaacaaaagttcgaaagaaaaaacaaaacaaaaacacccagccctgttccaggagaatttcaagttttacaggttgagcttcaagatggtttttttggttttttttttttctctcatccaggctgaaggattttttttttctttacaaaatgagttcctcaaattgaccaatagctgctgctttcatattttggataagggtctgtggtcccggcgtgtgctcacgtgtgtatgcacgtgtgtgtgtccattagacacggctgatgtgtgtgcaaagtatccatgcggagttgatgctttgggaattggctcatgaaggttcttctcaagggtgcgagctcatccccctctctccttccttcttattgactgggagactgtgctctcgacagattcttcttgtgtcagaagtctagcctcaggtttctaccctcccttcacattggtggccaagggaggagcatttcatttggagtgattatgaatcttttcaagaccaaaccaagctaggacattaaaaaaaaaaaaagaaaaagaaagaaaaaacaaaatggaaaaaggaaaaaaaaaaagaactgagatgacagagttttgagaatatatttgtaccatatttaatttttaaagtctctggtattagcctcataagttattgactattccccggggttggcggggagtggggacatgagttggtctgcctgttgtggggccgggaaggggagggagtcaggcacaagtggcctctttgtttggtcttaaaggcatccatttctgggaatgaagccatgttcgctgctaacacttttggatgttgtgaggccacgtggagtgtgtgagagactaggttttatggatggtctggttcaggtaccaggtctgctggaaggttcctgttcggataagctggtagctacctagctctgagcctgccttcaagaacacctgtgttcatcctctgattctctgtgtgtacctcttgtggcgtttcctctcccgggtgtgaacatcctaaccgttattgtgcaaacccaagaacgtcagatcccaaagcacaacaacctggatggactttgggaacatctaagcaatgtaagagagaggtgcactgagagtacgtcttggtcccctccaccctgagagcatctgacggtcctcagtactgaactcccggaagctgctctgagcccggtgacctcatctgggccaggtgtggtgcctgagctgaatgctcaggtgcttacagtgttgcaatccctaagagagtagagtctggaggagaaaccgtgaaaaagaccttacacaccaccaagaacttccgaatgggcgtgaatccaccgtttcttctctttgcaaaaagaaccaccacagctgctcaaagaacacagtgaactcatcactttggttcatcaaaaaatcatcgcccatgcgttattcctgagtgcattttcttacaactttttgactgcttccttttcttcttctcttaagagttgtgggcttaagaatgggatagagtcataatggcaacctccaagccctctcaattcttgattaagaacacaggtagacatgaatcccaattgtctattgctatcttatttatatgattcgggaaaatacagcatgtaaaaatattgctgaggagcctcagtgattgggtacaagaagcaagagtacagaaattatttttgccaaatttattttgtaaatatgagggtctgtacctaaatttaaaaaaaaaacacgtagaactaggtattttgttctcttcttagtaaatttgtagtggttgtatactacactagctgcaattttcacatttttctaattcagaaaggtttttcttatattaggggaaaaagtatttattttaatatataaaatcactctgaaaatcactctcataaaaaatggagcgcatgtaaatttttatcaaagaaaaataaacaggtgaatgggggatagtgattttcttttttcagcacagtctacctcagtgtattgttaagatgtgattcaatcatggacatctttgagatttcagaattctacctggaaccggtctgaatcagggaacgtgtgtatcagctgattcgaatgccagggaccagtaagaattttgagggagggagttgggatggagaaggtatggcctttatgcgagcatagatccttttcttcctggctggtaatattcttctctgaatttaatcttcctttaaaaaaaaatcctccatctattgtcactatgttccccaaacataaactaagttccaggctgtcatgatgtatctgatatatggggtaacccagcaaggtgtaccttcctttggtgagagatggctgccggggcaaagacgggctttgattcagagcaagcattcccacctgttccatggaatccccctgaagtgagcacaaaggtgccctgggctccctgatggtttatgcccactcctttcaggctggtgatgcaccttacacacaaacacctaatgcaatgtctttttaaattctccaagtgggatgggagcatgtgagggaaattccaatccaaaacccattaatgtgctgaacgctttttttttttttttttttttttttgcaacaacaccttggacctctgtgttggggtttgactgacctcaagctgatattattggaccttgtgcagctttgataacccatgtgagagtctaggcaggaccagtggggcccaaatcttgctgctcttgtacttttaggcactgcccttgcagactcacctttctccacctgccctggagaaaggtagggtgtgctgggcctgccccttgcaaatgggattcaccagtttcatttatttgactctactgccacagtgaaaagagcaaacagctattgggttgcaaacctcctttgacattaggaaatgttgactttgtaacaataaaactttggtcctagaaagacacggttgtcctgggagtttgtagtgttaagttgcaacaacaacaacaaaaagcaacaaaaccagcttaggataacactttttgttgcttgttcttaaagatgtctcactatgattaaaacccttttcattaatgtagtgaaagccacacaggagttccttcttccaggaggagaataccaagcacatcactttctctctgcatcagtgatgtcaaatacgcatcagaaaatgttcaggttttaggagctgtcctaggtgctgtttcatcattggaagcagtgagaaagagaagcactgctgcttgtctggatataggctgaggatgattgagagaagctgtgggaactgacacaagggtctgcataggtcatcctgtgaccctggggactatgttaccaactgacagacagatctttcactgtatcctagcagggcaggtagtccaccaagaaatgtgcttattggattgggaggtgtttatttgtagtctgctgtaacacgtgtgaaagagcaggagcgtcatcagcatatgacttgcgctggtcatccggtaaatggatgtgctgtagtcccagtgctaatcatttctctccttcacagtgggtggaagtttagggttaaatgtcctttgaatgtcacctggtgagtccttgacaccttaggctcttcagaaacaatggttttgttgaggatggggaacagggaatgccgattttatatacatggtacacagagaggggtgtcacttcagaaaatcttccagcatgttcttcagaatattaatttatatgcgaggtgaggttgggaatgaaaagaacaggtcagcacttttttttttcctagaacatacaaaagaacatggtggactttcagggagtgcaatggaaggtgaatatttccttaagggtccccgagaaatgggagtgaggggaggggacacaatggctttttgagcttacttttaccttctgatactagtcaaggtccagaaccagccaccagccaaatttctatctgggtgcgggccactgaaaatccttgttaaaaaccagatcacaaatctggggctcttggtcccattggagaaggaaggaagagcctcaaaataagtgtgcacccatgcacatattcaggaacagcttgtttagtctttacactttgcctgaaagttgcttctcctcgtccctttgtgtgcctgggtggcctcggccctgtgcgttggcaacgcaggatcaaatgtgctgcagcttttgcagaaaacaactcagaaacacaaaaccccccaacagctcaattattattttttcaatgttttcctacaagagccaagtagcaccatgtacagaagacgcctttttttttggaatattgaaatcgttctgcatgtaaaatatgggataatgacctgtttatattaaaattctgattaaattatctgagaatacgcttgtttttgtgtggtgtcccggtaaggacctgtcgtgtggtcgggggatgtggctatgagttgggctgtgttaaggaaaacctcttggaatatgtaggtgcctttttttagaggagaaaaacacctagattcttccacacatgaaaagggaggttaaatagttgctaccagcagagttgatgactcgtagggacatacttgtatggccaaactggtggtttaaatattgcactatttccataccatttggtaagtaagcgcttccccaagggctcccagacctccccatggtccaaccactaaagggttcactccgagaataccaatgaaccttcaagatcttgctctattctgacatgcgggaaactcatatgttaagtattttcaatgtcatcctgggagtggagacctgtcccaggttgggtggacaggtgagtgaccatgggttagaccatgggattgaaagccttttgaatagtctttcttgagtggcttaaaacagcaactgtttatttattttctttttttgtttgtttgtttttgtttttgttagtttgttttttgaaatggagtctcactctgtcacccaggctggaggacagtggtgcaatctcagctcactgcaacgctgtctccgggttcaagcaattctcctgcctcagcctcccaagtagctgggattacgggcgtgtaccaccattcccagctaattttgtatttttagtttcatcatgttggccagactcgtctcaaactcctgacctcaggtgatccgcccgcctcagcctcccaaagtgctgagattacaggtgtgagccaccacacccagccttattattatcattatgatgattatttttgtatttttagtagagacgggttttcgccatgttgcccaggctggtctcgaactactgttctcaagcgatctgcccgcctcggcctcccaaagtgctgggattgcaggcatgagccacggtgcctggcctgtttcttacagttctatgtgttggttgggtggttcttccgggaacagcctcactcctgtgctgaggcctctgctgggagagccaggattgcttgtcttctaggaggttcactcaggcttgttcatatggtggtggttgcagggatacccagtcggaaggaacaaaaagcccccaaatgtaaatattttccaaacttctgctcgtgtggtatttgctactgtcccattgcccaaagtaagtcccatggccaaacccagagtcagctttggagaggactgtccaaggatgcagataaaaggtgatgtgaaccaactagagtccaatcctgcaataatcttccactcctttaccctcctatcattattattatatttttttaataatataaaagtgggccgggcgcggtggctcatgcctgtaatcctagcactttaggaggctgaggcgggccgatcacaaggtcaggagatcgagaccttggccaggagatcacctggccaacatggtgaaaccccgtctctactaaaaacacaaaaattagctgggcgtggtggcgggcgcctgtagtcccagctactcgggaggctgaggcaggagaatcgcttgaacctgggaggcagaggttgcagtgatctgagatcatgccactgtactccagcctgggcaacagagtgagactctgtctcaaaaataaaaaaaaaaatactactactactactactaataataatataaaggtaaagttctcactttaccatcctattattattattattccttgtttttgagatgggagaaatagcagtatggatgatgacagggataatccagtcatcagagggaaaagagatgaaggcaggggatcactagctctatgtccttaagcaaacaagtgacgatgagatctacggcacaggtggaggggttgaccttagctaaagtgcaaagtatgtgggctgtggaatctctctccctcccaaaggcaatggaactcaatccccaacccct

SEQ ID NO: 60 - DNA, 1364 bp, Homo sapiens
ccttcgcgccctttggcaagctcggactcatcttctggggattgccgcagtgacccagtaatgggaagggattgatttccaccttgcggggtatggggcgctcttaggaggactctggagaagtagttgtcctgggagaggagcgatcttaatcctgctgcatgacgggaggacaaaatgcgacgctgcagctattttccaaaggacgttacggtgtttgataaggacgataagtctgaaccaatcagagtccttgtgactggagcagctggtcaaattgcatattcactgctgtacagtattggaaatggatctgtctttggtaaagatcagatgtcatcgcaacagataaagaagacgttgccttcaaagacctggatgtggccattcttgtgggctccatgccaagaagggaaggcatggagagaaaagatttactgaaagcaaatgtgaaaatcttcaaatcccagggtgcagccttagataaatacgccaagaagtcagttaaggttattgttgtgggtaatccagccaataccaactgcctgactgcttccaagtcagctccatccatccccaaggagaacttcagttgcttgactcgtttggatcacaaccgagctaaagctcaaattgctcttaaacttggtgtgactgctaatgatgtaaagaatgtcattatctggggaaaccattcctcgactcagtatccagatgtcaaccatgccaaggtgaaattgcaaggaaaggaagttggtgtttatgaagctctgaaagatgacagctggctcaagggagaatttgtcacgactgtgcagcagcgtggcgctgctgtcatcaaggctcgaaaactatccagtgccatgtctgctgcaaaagccatctgtgaccacgtcagggacatctggtttggaaccccagagggagagtttgtgtccatgggtgttatctctgatggcaactcctatggtgttcctgatgatctgctctactcattccctgttgtaatcaagaataagacctggaagtttgttgaaggtctccctattaatgatttctcacgtgagaagatggatcttactgcaaaggaactgacagaagaaaaagaaagtgcttttgaatttctttcctctgcctgactagacaatgatgttactaaatgcttcaaagctgaagaatctaaatgtcgtctttgactcaagtaccaaataataataatgctatacttaaattacttgtgaaaaacaacacattttaaagattacgtgcttcttggtacaggtttgtgaatgacagtttatcgtcatgctgttagtgtgcattctaaataaatatatattcaaatgaaaaaaaaaaaaaaaaaa

SEQ ID NO: 61 - DNA, 2099 bp, Homo sapiens
tcccggaggcgagcgcgaccggaagtccggtcactctcgcgaggccccagagagcaggcgctgggcagtgtggaggtcgttggagtcacttccgcgtcaccagctcctgtgcctgccagtcggtgcccctcccgctccagccatgctctccgccctcgcccggcctgccagcgctgctctccgccgcagcttcagcacctcggcccaggctacctcggacctgaacagctgcctgactgcctgaaaggttgtgatgtggtagttattccggctggagtccccagaaagccaggcatgacccgggacgacctgttcaacaccaatgccacgattgtggccaccctgaccgctgcctgtgcccagcactgcccggaagccatgatctgcgtcattgccaatccggttaattccaccatccccatcacagcagaagttttcaagaagcatggagtgtacaaccccaacaaaatcttcggcgtgacgaccctggacatcgtcagagccaacacctttgttgcagagctgaagggtttggatccagctcgagtcaacgtccctgtcattggtggccatgctgggaagaccatcatccccctgatctctcagtgcacccccaaggtggactttccccaggaccagctgacagcactcactgggcggatccaggaggccggcacggaggtggtcaaggctaaagccggagcaggctctgccaccctctccatggcgtatgccggcgcccgctttgtcttctcccttgtggatgcaatgaatggaaaggaaggtgttgtggaatgttccttcgttaagtcacaggaaacggaatgtacctacttctccacaccgctgctgcttgggaaaaagggcatcgagaagaacctgggcatcggcaaagtctcctcttttgaggagaagatgatctcggatgccatccccgagctgaaggcctccatcaagaagggggaagatttcgtgaagaccctgaagtgagccgctgtgacgggtggccagtttccttaatttatgaaggcatcatgtcactgcaaagccgttgcagataaactttgtattttaatttgctttggtgatgattactgtattgacatcatcatgccttccaaattgtgggtggctctgtgggcgcatcaataaaagccgtccttgattttatttttcaaggtcccttctgtaaatgctgtgctttcttccctgtgagagccaactttagagtgtctgctacctcttcattaccaatcagaattagatgatgtttaactgttagactgaagcgtgacgctttcatcagtagcttcaagaaagtctaaattgttaatttatggaattggacacagtattcagtttacccgtacatgctcctcccgcccctcctgttggcacccttgcatcgcccaggcctgattcctcctgggggtagttcacccccacgggttcatagttcagcggcgaatgccaggcagctgttttctggctgagcaaacagcacctttctcattgagcttcctctactgacctctgtcccccttgggatttcatcttctgaccgaaccctgatgttcagtggcagagacagcccatagccagaactgtgggtagaccagggttggggtgtgcggtttgggacagcccaaaccccagccgctgtgtcaaggcctaggacgccatgctgccatcaaaagggggttccaggtttccatcagtggcctaaagaagggacttcttgttgtactgaggagtgcggaattaaagagatttgactccctttagtattgggggcagtccgttccccagacactgtggcctctgaagtggaaactgaaagctgcatacctgggaaagaactttctaggaataggcaatggccttcagtggaagagggagggctggaggtgtgcccagtacttggatgttcatctgtccacaacagctttttgtttttttaaaaaagctaaaatggaaatggattttatcataaaggatgacatcgttttcttctacaattaatacatgttcattgtataaaacccaaaaagcagctaaaaaataaagcgggaaaggaactactggtaaaaaaaaaaaaa

SEQ ID NO: 62 - DNA, 1509 bp, Homo sapiens
acagtccctgcattgcgcgcgacccggcggcgggacaggcttgctgcttcctcctcctcggcctcaccattccagaccaaaattgaaaaaatggttgacctcacccaggtaatggatgatgaagtattcatggcttttgcatcctatgcaacaattattctttcaaaaatgatgcttatgagtactgcaactgcattctatagattgacaagaaaggtttttgccaatccagaagactgtgtagcatttggcaaaggagaaaatgccaagaagtatcttcgaacagatgacagagtagaacgtgtacgcagaatcaaacaaaccctgagcatttatcttgcctcttctatataaagtttaactcggcataaccaattgctgatgaagaagaaatgtttccttgtagaagcaaaccagtgaataattgaagaaaaaatttatcttttcaacatctaatgagttaatggattcaagcaaagattatccacggctgttaacaacacaaaaagacaatcggaaattagctattactgcgggaagtacccaataccatctatgaaactgtgtggacaaaaacactgacaaaaatctccacgaatctctaattttgaatacaaatttaaagaaaatgcaaaggattaaaatagaccatgatgaagtcagaaaaattcagacagagaaaaatgctccaggaccagaaacccatttcttccgcaaaagcttccaggtagagattgactgaccgagagaacagagacatagagagaacctagagattaaaagaaacttgagcgatttgtcagcattcagttgcaacgtatggatgtgatttgaattctaatttaaaaaccaaagtagaaagtggtaaacaattggggaaatgtgaacaatgatagaatatttaatattaatgaaatatgttaaatattttcagatatgataatggcattgagtatgtaaaaaagagcctgtttttaaagaaatacctctgaaatacagatgatataatatcatctgtatattagatgatattatatatatcagtatcatcagaataaagtaaggttagcatgaattgttaattgttgacactgtgcaataggtacgtggataattactatactgttctcattccttttatttatgtttgaaatgttctaaaattaaaagttaaagcatagagtgtaaagttgagcaaattcctccaagacctaaatatagcttatcaaaacttacattaattagatgctgactgttgagctaatacttttttttaatgatgtgtgcttcagtttattgcacttttcaaatactccagttttttgtgtgcgtgtgttttttaaattttattattattaaagttttagggtacatgtgcaaaaaaaaaaaaaaaaaaaaaaaaaaaaaaaaaaaaaaaaaaaaaaaaaaaaaaaaaaaaaaaaaaaaaaaaaaaaaaaaaaaaaaaaaaaaaaaaaaaaaaaaaaaaaaaaaaaaaaaaaaaaaaaaaaa

SEQ ID NO: 63 - DNA, 2584 bp, Homo sapiens
acttccggcgggaggcggaggcggaggcgcaggcgctggctggcaggtgtcgctaaccggacggtggtcgccagggcgagaggcgggagccggagagccccgccgtggccccggacctcttctggggaacctaccgccctcacgtctacttcggcatgaagacccgcagcccgaagcccctcctcaccggactgatgtgggcgcagcagggcaccaccccggggactcctaagctcaggcacacgtgtgagcagggggacggtgtgggtccctatggctgggagttccacgacggcctctccttcgggcgccaacacatccaggatggggccttaaggctcaccactgagttcgtcaagaggcctgggggtcagcacggaggggactggagctggagagtgactgtagagcctcaggactcaggtacttctgccctccctttggtctccctgttcttctatgtggtgacagatggcaaggaagtcctactaccagaggttggggccaaggggcagttgaagtttatcagtgggcacaccagtgaacttggtgacttccgctttacacttttgccaccaaccagtccaggggatacagcccccaagtatggcagctacaatgtcttctggacctccaacccaggactgcccctgctgacagagatggtaaagagtcgcctaaatagctggtttcagcatcggcccccaggggccccccctgaacgctacctcggcttgccaggatccctgaagtgggaggacagaggtccaagtgggcaagggcaggggcagttcttgatacagcaggtgaccctgaaaattcccatttccatagagtttgtgtttgaatcaggcagtgcccaggcaggaggaaatcaagccctgccaagactggcaggcagtctactgacccaggccctggagagccatgctgaaggctttagagagcgctttgagaagaccttccagctgaaggagaagggcctgagctctggcgagcaggttttgggtcaggctgccctcagcggcctccttggtggaattggctacttctacggacaagggctggtattgccagacatcggggtggaagggtctgagcagaaggtggacccagccctctttccacccgtacctctttttacagcagtgccctcccggtcattcttcccacgaggcttcctttgggatgaaggctttcaccagctggtggttcagcggtgggatccctccctcacccgggaagcccttggccactggctggggctgctaaatgctgatggctggattgggagggagcagatactgggggatgaggcccgagcccgggtgcctccagaattcctagtacaacgagcagtccacgccaaccccccaaccctacttttgcctgtagcccatatgctagaggttggtgaccctgacgacttggctttcctccgaaaggccttgccccgcctgcatgcctggttttcctggctccatcagagccaggcaggcccactgccactatcttaccgctggcggggacgggaccctgccttaccaaccttactgaaccccaagaccctaccctctgggctggatgactacccccgggcttcacacccttcagtaaccgagcggcacctggacctgcgatgttgggtggcactgggtgcccgtgtgctgacgcggctggcagagcatctgggtgaggctgaggtagctgctgagctgggcccactggctgcctcactggaggcagcagagagcctggatgagctgcactgggccccagagctaggagtctttgcagactttgggaaccacacaaaagcagtacagctgaagcccaggccccctcaggggctcgttcgggtggtgggtcggccccaacctcaactgcagtatgtagatgctcttggctatgtcagtctttttcccttgctgctgcgactgctggaccccacctcatcccgccttgggcccctgctggacattctagccgacagccgccatctctggagcccctttggtttacgctcccttgcagcctccagctccttttatggccagcgcaattcagagcatgatcccccctactggcggggtgctgtgtggctcaatgtcaactacctggctttgggagcactccaccactatgggcatctggagggtcctcaccaggctcgggctgccaaactccacggtgagctccgtgccaacgtggtaggcaatgtatggcgccagtaccaggctacaggctttctttgggagcagtacagtgaccgcgatgggcgaggcatgggctgccgccctttccacggctggaccagccttgtcttactggccatggctgaagactactgaagggagggagaggaggggagccaagacactcatgccactctggctctgaagggacaaaggcttctggcttttgcccccagccccttggataccagtaattcaaaccttcctcatttcatctcaggtgtctccttgctgtcatcccacatagccctggggtgaatgtgaatccagagtctatttttctaaataaattggaaaaaacattttgaactctaaaaaaaaaaaaaaaa

SEQ ID NO: 64 - DNA, 504 bp, Homo sapiens
ggcgcacccgggaggcggggccagcgaggcaagatggagttagtgcaggtcctgaaacgcgggctgcagcagatcaccggccacggcggtctccgaggctatctacgggtttttttcaggacaaatgatgcgaaggttggtacattagtgggggaagacaaatatggaaacaaatactatgaagacaacaagcaattttttggcatcgttggcttcacagtatgactgatgatcctccaacaacaaaaccacttactgctcgtaaattcatttggacgaaccataaattcaacgtgactggcaccccagaacaatatgtaccttattctaccactagaaagaagattcaggagtggatcccaccttcaacaccttacaagtaaagacaatgaagaacagttgaaacatgcaaaatatggagcttttcatgtaattactcttttactgtttaccattcactataattcacaattaaaattgtgtgactaaacaatgaaaaaaaaa

SEQ ID NO: 65 - DNA, 604 bp, Homo sapiens
cctttcatcctggcgtttgcctgcagcaagatggcggcggtgtcaatgtcagtggtactgaggcagacgttgtggcggagaagggcagtggctgtagctgccctttccgtttccagggttccgaccaggtcgttgaggacttccacatggagattggcacaggaccagactcaagacacacaactcataacagttgatgaaaaattggatatcactactttaactggagttccagaagagcatataaaaactagaaaagtcaggatctttgttcctgctcgcaataacatgcagtctggagtaaacaacacaaagaaatggaagatggagtttgataccagagagcgatgggaaaatcctttgatgggttgggcatcaacgatggagctatgacattgaagagaggaaggttccaaaacccaagtccaagtcttatggtgcaaacttttcttggaacaaaagaacaagagtatccacaaaataggttggcactgactatatctctgcttgactgtgaataaagtcagctgtgcagtatttatagtccatgtataataaatacatctcttaatctcctaataaattggacctttaaactacagat

SEQ ID NO: 66 - DNA, 580 bp, Homo sapiens
gctgcaaacgtctcgctgaggtcatcctttacggcaggcgtccgcgtcgctagctagtcgttctgaagcggcggccagagaagagtcaagggcacgagcatcggccatgcctttcttggacatccagaaaaggttcggccttaacatagatcgatggttgacaatccagagtggtgaacagccctacaagatggctggtcgatgccatgcttttgaaaaagaatggatagaatgtgcacatggaatcggttatactcgggcagagaaagagtgcaagatagaatatgatgatttcgtagagtgtttgcttcggcagaaaacgatgagacgtgcaggtaccatcaggaagcagcgggataagctgataaaggaaggaaagtacacccctccacctcaccacattggcaagggggagcctcggccctgaacagagcagctgctgatgtctggaggctgattttcctgttctctgttctccactggaaaggttgtttacgacaaacctccttgtcaaagtgtgtaaaaataaaggattgctccatcctatttgttctattttctcttggaaaaaaaaaaaaaa

SEQ ID NO: 67 - DNA, 733 bp, Homo sapiens
tgcctggcgagggcgcgccccggctgggcgtggacactgttctccggccgcgtcgggccgggcgggtggggcgttcctgcgggttgggcggctgggccctccggggtgtggccaccccgcgctccgccctgcgcccctcctccgccgccggctcccgggtgtggtggtcgcaccagctctctgctctcccagcgcagcgccgccgcccggcccctccagcttcccggaccatggccaacctggagcgcaccttcatcgccatcaagccggacggcgtgcagcgcggcctggtgggcgagatcatcaagcgcttcgagcagaagggattccgcctcgtggccatgaagttcctccgggcctctgaagaacacctgaagcagcactacattgacctgaaagaccgaccattcttccctgggctggtgaagtacatgaactcagggccggttgtggccatggaacatcattcatggcagtgattcagtaaaaagtgctgaaaaagaaatcagcctatggtttaagcctgaagaactggttgactacaagtcttgtgctcatgactgggtctatgaataagaggtggacacaacagcagtctccttcagcacggcgtggtgtgtccctggacacagctcttcattccattgacttagaggcaacaggattgatcattcttttatagagcatatttgccaataaagcttttggaagccggaaaaaaaaaaaaaaaaaa

SEQ ID NO: 68 - DNA, 19291 bp, Homo sapiens
agaaaagaaaagaaaagaaaaaaaaaggaatcagtcccttctcataaagcatttacattcgagttgtagtttcagggtccttgtttgtttcccatctgtctgtctgtctgtctctctctctcgaccaacctgtgtagagtgttttgcgaaaaacacacatgtacaagttactagattgactcttttttttttttttctgaggcagagtctcactctatcacccgggctggagtgcagtggccatgatctcagctcactgcaacctccgcctcccgggttgaagcgattctcctgccccagccttccaagtagttggaattacaggcgcgtgccaccaatcacggcaaatttttgtattttttagtagagacgaggttttgccatgttggccaggctggtctcgaactcctggccttccaaagtgctgggattacaggagcgagccaccgcgcccggcctattagattggctctttatccctgctgaacatctctagttcttcttcgactcactttgaatcctggaagcaccactacattaaatgtctcttcatactaataagaattttcgtccaaatcgcgcaatcacctccagggccaggaaaggggacccccggtcgggagtgcggactgggcgtggtcactgaccccgagcgtcccctccttctggctgacacgcggctgcagacgcaggagcctcctgctggcgactggagtgtcactataaataattgaggccaacacccgcggagtgacattccaccccggtaggcctggcctacagctcccagcaagcctcgcgcaagctcgtggactccatctcccggcgggccggcactgccctgccgggcggtcaatggcccgctctgagtaggtttttccgtttttacctgacagctgagaatgtctggaagcggaggggcggtagcagcctgcctgggaatgggccaccccgaatcccgacccgaaataaatgcaccagcatgctgacgcggtaaaacaggagccgccggcaatagcagtttcaccctcatcccactgagggctctatgttggctcccgcccccatcccgacaaccccctcgcgccttggcggtgattggtgaaaagacacatcaatctcacttcaagctgtgattggaggatatgttgtcagccccctccttttggaactgtgattggagggaatcgcctatccgcccgccccctgctctgggcggagccgagcaggaagtgggcctggcttttgccaggtgctcctgtgggctccgggtgacgtccaaagggtgtggcccgactggccctccaagctatggagtatccatagtaacgcgtcagccgccgacctcgggccattttcccaaggctccaggatctctagatgtcccgtcgtctcaagggcgtgtagaacgcgggttttgggggaggaatgaacaaaaatcgactgggagttttttcaaaacacgtacatatgccctgccacccaccccgctctcctaggtgcgtcagaactgctgggacatctgtcacgtgaaggggtgggttgcccctccacacctgtgggcgtttctcattaggtggaaggagagacttggaaaagaaagagacagagagacaaagtatagagaaagaaaaatgggcccaggagaccggagttcagtttacggaagatccacgccggcaccagcctctgagttcccttagtatttattgatcattatcgggtatggcaggataataggataatagtggagagaaggtcagaaggtaaacacgtgaacaaacgtctctgcatcgtaaacaaggtaaaaaaaaaaatgctgtgcttttgatgtgcatacacataaacatcacaatgccttaagaagcagtattgctgccagcctgtcccacctccagccctaaggcggttttcccctatctcagtagagataggctttacaccgagacatttccattgcccagggacgagcaggagacagaagcctttcttttatctcaactgcaaagaggcattccttcctcttttactaatcctcctcagtacagaccctttatgggtgtcgggctgggggacggtcaggtctttcccttcccacgaggccatatttcatcacatggggagaaaccttggacaatacctagctttcctaggcagaggtccctgcagccttcctcagtgttttgtgtctgggtacttgagattagggagtggtttgagattagggagtggtgatgactcttaagaagcatgctgccttcaagaatttgtttaacaaagcacaccgtgcacagcccttaatccatttaaccctgagttgacacagcacatgtttcagggagcacagggttgggggtagggttacagatcaacagcatctcaaggcagaagaatttttcttagtacagaacaaaatggagtctcctatgtctacttctttctacacagacacaggaacaatctgatctctctttcttttccccacagtcacgtgtacttggggaagaactcccccggtgattctgacactcttgccctacgcctcagccattgagaactattggtatggagggcctgtaatttatcaaggcgcggcctcagatctgtctgcctcgcagataccttcctcacccgggtcagaatgacttgcctcaggctcctgccaaagagtttgcaccactcgtttcttccctgtaattacttgtttgcgtatttgtctccccactgggctgcagcttcttgggtagtggctctgttttattcatctgtcctcttcccttccaaatgcttggcaaggaaaagtgccctttaaaataaatcgacttgaattgggagtggtggtagggaggctgtcaatgagaatgaattcagggtgaaactaggtaggacaatgtcccaggattagtttggggttgagctggggagctcttggtgtatgggggggtcctattgtgactatggtggaatagccacgatactgagtgacattgggcgagtgaggtgggggagagactagacaacaccccacataacccatcttgacagatgtctcagaaagattatgggaatttcctggcccctctgcaatgtgggattccattttgctacctctagaaggacagggtcttgttttcatagctctgcctcctactctgagataaaggcatgcaagacctgagctactactacaataccccacacagaaggagaaaatcaggcacatctggattcaagttttgtgggtgattccatgattgcctccagtgaacaatctgggaagcacagtgtccatatcgccatttcaggggtactggccccaacatcagcccttaggcctaagccctagagaccttgacacctggtggctgagtcagtatctcagtaatgggctttagaaggaaacctggtgattcagggcctcaagaatggcgttgggcaagccaccagaccagctgcctgggtctcctcctccttgttgaggtgacaacaaggaactcagttcagctcctccctgggtatccaaattatccttccaagtcccagactcacagctgtcctcccttctgattcagccctgatgcttttcagggggtcccagaagtgggatccggacttgagagaatgtcacagttgaaaatgataaggatgcaaacggaatggaactttcagagaaccccaattttctactctaagttctccaaaccaactctcaaatccaagatagctgcctttcctttcttcacctcctcttcttagttttccccaacttggctgcaaagtcagcctcccctcttctcttccttagcacctcagaccaataaaacatgcaaccttttcttattctttttaaaaaatttatttttgaccaggcgcagtggctcacgcctgtaatgccagcactttgggaggccaaggcgggtggatcacgaggtcaggagttcaagaccagcctggccaacatggtgaaaccccatctctactaaaaatacaaaaaattagctgggtgtggtggcacacacctgtagtctcagctactcaggaggctgaagcagaagaatcacttgaacttgggaggcggaggttgcagtgagccgagattgtgccactatactccagtctgggtgacagagtgagactgcctcaaaaagaaaaaaaattattttgtttgttttttagattttgtagagatggtgtttccctaagttgctcaggctggtctcgaactcctggcctcaagtgatcctctcgcccgggcctcccaaagtcctgggattacgggtgtaagccaacatgcctggcccctttacttcttcttttctgttttggtcacaaaacatttctctgttgatcactgtagtgtgtgtgtggagggaagtgggggaggtacactcttaagaaatgaaatagttaacatcttggtcctaagatttgttgtagagatggagtcttctcattctgttccccaggctggtcttgaactcctggcctcaagcaatcctctttcctcggcttcccaaagtgctgagattgattacaagtgtgaggtactgcgccctgctacaatcctttaataggatgtttttggggggggtggcagggggcaggatctagctcactgtaacctatactgttccagtgtaacctgcaccaagccatcctcccacctcagtctcttgagtagctaggaacacaagcacacatcaccacacctggctctaacacgattttgctttttgcttttgtcattttggctgctgttctttttatctttcattcattcaaggtctgaagatggagataataggaatcttctcatctcaatgtgctctttggcccctcctcttaaactgatgcccctctcaggccctgagggatttggcctcaggttgccctggaaggggtgtgagtgatcagacaggtgactgagagctgggacgcctgaggcctgcctaggctgagtcacctagtaatgttgttgtcattgttcctgttgaagtcccagctcagtgtcacagacctttgtggaagcaacaacagctcccatccttccaacctttctggagaagccgtggcctgatggtgagccgaatgggctggggggggagaagaaggcggctggggcggtggggagatctggggcccggatcggtgcccctcctccccatgccactgccacctcctcctcctccttcatgccggggacctgggggagggaggatctccatcttctctctgtcccctgcccctcatacaagaagctccccctcctcattttcccctcccaccgcagggcccccttgctcagtgctacaggggacaggggcttctcagtcttgccacagtgctctccctatcccagccacccccccaacacaggctcaacctgcaatgacacctgcctctgcatctccctcctggggatcccactccaccccacccctggccccggcaacccccactccctcacagcagtgcccccaggactctcctgggctgcgggtaggccctttgatccctgaacaggattatgagcggctggaggactgtgaccctgaggggtcccaagactcacccatccacggggaggagcagcaacccctgcttcatgtccctgaagggctccgaggtatgtgtgtgggtgtgggtgggagagggttagtggtgcctgggagctccagtacttatcccaggctgggcctctggcagcgggttgagaacgtggagaattgatcacatgccaggggctgacactctcccctctgtgcccaggctcctggcatcacatccagaacctggacagtttcttcaccaagatatcctttgcgctaggcctgcagaggtggcatgggaaggtcctcttggagctggcactgttcttggcagggagactccgtgagggcgtcatgggtgggagacttgttggggctgaggggaggtgtcctcaggagaggccccccgtgcctcaggcttgttccttgacacgcagccacatctacagctaccaccagcggaatggctttgcctgcatcttgctggaggatgtcttccagctggggtgagacgcttagcccgggcccggaactcggtcccctgggcccatggcttccttctgtcattttgcttccttaattgtgccagctgcttccatcccatgctttcccgagcagcccaagggctcagcaggggcagggtcagggaggataaccatgggctgctctgggggctggggcaggagcccacctggctgtccctgatcactgcagcatcccggcacccccccttcctcccggcagacaatttattttcattgtcaccttcacaaccttcctccttcgatgcgtggattacaatgttctctttgccaaccaaccaagtaaccataccagacctgggccgttccacagcaaagtgaccctgtcagatgccatcctaccctcagcccagtgtgctgagaggttagtgacaacctggtggggccctgggggtgaagcatgggcagtgggtagaggagtagacgggagccccactttgtcccgtcatctagatcagcagttctcaaagcttttggtcttaggaccaaaaatacacttaatatactttaagttgtacttaagtgtattaagttgtacttaaagtgtattaagtatatctttttttttttttaagacagagtttcactcttgttgctcaggctggagtgcaatggtgaggtcttggctcactgcaacctccacctcccaggttcaagcaattctcctgcctcagcctccccagtagctgggattataggcgtgcaccaccacgtgtatttttagtagagacagggtttcaccatgttggccaggctggtctggaactcctggcctcaggtgatccacccactttggcctcccaaagtgctgggattacaggtgtgagccactgtgcccggccttttaagtgtatcttaattacagtgcattaagtgtatcttaatacacttaaaattggttgagaatcctgaaaagcttttgtttatgggagtcgtatctatccacattttaccttataaaaaattaaaattaggccgggcatagtggttcacacctgtaatcccagcactttgggaggctgaggcaggaggattgcttgaagccagaagtttgagatcagcctgagcaacaaagtgagaccacatctctataaaaaataaaaattagctgggcttggtggtgcgtacctgcagtcctagctaagcctagtcaggaggctaagacagtgactgtctctgatcactgcagcatccctacaccctcctccctcccagcagacgattcattttcattgttgccttcacaaccttcctccctgaagcatggattgcaatgttctctttgccaaccaaccaaataactgttccagacctgggccgttatttggcagggagataggagctatgtttctactgctgcactacagcctgggtaacagagagagaccttgtttcaataaaaaggaaaaaaaaaaaagaaggaaattgtagctgagaacaactttaaaatgtaagagtgcggctgggcgtggtggctcacacctgtaatctcagcactttgggaggccgaggcgggcggatcacaaggtcaggagatcaaaaccattctggccaacatggtgaaaccctgtctctactaaaatatacaaaaattagccaggtgtggtggcgggcgcctgtagtcccagctaccctggaggctgagacaggagaatcatttgaacccgggaggtggaggttgcagtgagccaagattgcgccactgcactccagcctgggcgacacagcaagactccatctcaaaaaaaaaaaaaaagagtgtacaagcacacatttcatcagctgtcagtgtgatgtgacatgttcacgtgtcttgtagcctctggaaaactccactgtactctcagagtacaagaatgaaaacatcagaaagcattagtattatttggaaaaagtttgactttgcacatttgtgaaggccacttcagcacccaccccctgccccgggctctaccttgagagctgctggtctagctagatccccctcctcatgatggtttttcctcactcccgaagtctggtctgcctctttctcaggcgcccacctttctcccccactgcccgcccaaccccatacaggatccgctccagcccgctgctggtcctcctcctggtcctggctgccggcttctggctggtccaactgcttcgctcagtctgcaacctcttcagctactgggacatccaggtgttttacagggaggccctgcacatccccccggtgagctgggtggctgtgtctgtgcagagggtgccgtgagagggtgggcagaggagaggggaagaagtgggactgtacaggtggaagggccaactggaaagagggcagaaagagcgaggtcttattgacacctgccctaggcccagaataatgtcaggagggggctaccaccacctagagagcatggcccttaccctaagggagtttagtttatttagatggctcatataagatgacatatagttacatgtttgtgctaaaaacattgattagagaaaagagaaagggcagttatctggcttttcagagctggaggaatttgggttgggcttcggaagggcaggacaggaggggaggggagcacattctaagccccagtgcaggaaggtggggaaaagccatgagcttttggaagctgcagtgaggagatggacccatcagcctaaaacagagccttcaaagccatcccccgcattgcaggaagccactgcattggcctgtcactgtccactgcttatgctctgccctttgtttcctcaccatcttgagtctgctcctccctcctctgtatctaagttctttctttgaggcacagcttgaaagtagccttctgcagcttgcttcccttgctcccctgggaggtccggagccctctgcacagcctttatgtgcagcaaggggagaggtcttagaaggcccctgagcagaggagagggaggaggccggggaagcagaggtggtgagagcggaagctggacctcggattggctctggcgggagactgctcacccgtctcgttctcctcctcccttctttcccctcctcccctgttccttccaggggaagggaagggaagacactgggatgtactggagaggccagcctgggggacttgactaacctggactgggaaagctgagtgaaactgggctgaagtgaggtttgcagccttcaaatgagatctgacagtgccccactgccagatgtggacatagcccaggtcctgggaaggcttctggtgacagagccgaagatggcctggagtcgggtggggctgggagtgtaaagcatgcccaggcagaaggtggggaggattctgttccagagttggtgggtgcactagaaatgggaaggagagattctcccacgaactgccagacattctggttttttgtttttttgtttgttttgtttcttttgagacagggtctgggtctttcacccaggctggagtgcagtgctgtgatattggctcactgcagcctctgctccccagtagctgcaaccacaggtgcacaccaccacgccctgctattttttgtatttttagtagagacagtgtctcaccatgttgcccaggctggtctcgagctcctaagctcagacgatctgcctgcctcagcctcccaaagtgctgggattacaggtgtgagccaccgcccctggccagccagtctgttttgtgtgtacaactgagggggcctcaggcccttaaggagctgagaagccaggtccagcacctggaggcgtccccaggaagtgcatgactactggccacatgaatggcagggatgatgaacagggcagtttagaagaggatgaaggaagtagggcgcgcccttgttagtgacagggttaagggagggcagaaagagaaaggtgggagagggggacgatgtagcttggtcatggcgagtttgtgatcgcaaactcagtttgcgggttttcaggccgcacacttaggggtgtggagcttgagcatcactgtggagaggaatggggggtcgctggctctcatcagtgcccctttcaggaggagctgagctcggttccctgggcagaggtgcagtcccgcctcttggcactgcagcggagcgggggcctgtgcgtgcagccgcggcccctgacggagctggacatccaccaccgcatcctgcgctacaccaactaccaggtggcgctggccaacaaaggcctgctgccggcccgctgcccgctgccctggggaggcagtgcggctttcctcagccgcggcctggcgctcaatgtcgacctgctgctcttccgcggtcccttctcgctcttccgcgggggctgggagctgccgcacgcctacaagcgcagcgaccagcggggcgccctagcagcgcgctgggggcgcacagtgctgctgctggccgccctgaacctggcgctgagcccgctggtgctggcctggcaggttctgcacgtcttctatagccacgtggagctgctgcggcgcgagcctggcgcgctgggggcgcgcggctggtcccgcctggcgcgcttgcagctgcgccacttcaacgagctgccgcacgagctgcgcgcgcgcctggcccgcgcctaccgccccgccgccgccttcctgcgcaccgctgcgccccccgcgcccctgcgcacgctgctggcccgccagctcgttttcttcgcgggtgcactcttcgccgcgctgcttgtgctcaccgtctacgacgaggacgtgctagccgtggagcacgtgctcaccgccatgaccgcgctcggggtcaccgccaccgtcgccaggtgcgacggcagatgcccggggtggtggtgtgtgttggtttctctgatctggggccatgtgaggttccccccgaatccttacctctcccaccactggggccctctagccctacatcccaccgcgcgtcctcctaatcgcaggccccttccccccacggatcccgcctttcaggtctttcattccggaagagcagtgccagggtcgtgcgccgcagctcctgctgcagacagccctggcccacatgcactacctcccggaggagcccggccccggcggcagggaccgcgcctaccggcagatggcgcagctgctgcagtaccgagcggtgagggtgggcgcgacggcgggctgaggaggaagttgtggggtctgtctgcgcggagggtctgtctgcgcggagggtctgtctgggagagggcatgagacaaacggactataccaggagtctagggagtgactgggtggggaggcttcttgccctggcgagggtcgctggggactgcttggtcctgataacgcgcgtgggcccctcagcgacccctgctcagcctcaccgctgcttccccaggtctccctcctggaggagctcctgtccccgctcctcaccccgctgtttctgcttttctggttccgccctcgtgccctggagattatcgacttttttcatcacttcactgtggatgtggctggggttggggacatctgttcctttgcccttatggatgtgaagcgccacggacaccctcaggtcagagccgttccctggccctgggggtttgggctgggtgggagttcgcttgcctctcgggagcagacctgagttccagccctggctccattgcttgctacctgtgccgttgagcgggtcacttcccttcctgtgctctcgtgccctcgtctgtcagatggcaacaatggcaatgtgctctccagagcacagccaaggccaggcttgtgaacacacagattatgtctgtatagcctatgatggagttgctggcacatagtaacgtcagtaaatgggagcaaagaccacctgggggtgaggaatgggcttggccggtgggtggggctgagtaaggactggtgcctggaccaaggctgtcaggatcaccctgggcaaagcactgaggctcagccctatccccgagctggcaatcagtccaggggtgacgaatagatgacaggcccaggttctgcactgctgctgtatttttgggtgatggtgaacaagtccccattgtggtctgtttccttcacgtggaagatggggcagtgtttcctgtcccacctgttcccataaggctcagtgttcttagcacctgaaagactgtccttgctcacagtggctctcggcgggacagactgaggcctcgctgtctcagcgtgcggaggacggcaagactgagctttctttgatgcggttctccctggcgcatccactctggcgccccccagggcacagctctaagtttcttgggcacctctggggccgagtacaacaagatgcagctgcctggggtgccacctcggctcgcggcccctccaccccgggggtgctcagcaactgcacctcgcccctggtgagtcccaagcctggcctccccttctgccttcacccccacaactcctctccaaacccttcccctctaggctcaccttaggtagtaacctgcctcaccagcccccgcccccagcctgctctcctgccttctttaggcctctgcttcctccctactccgtttctgtcctctcttctgactccctctttggctttccctctcctcttgcacccagcctgaggccttcctggccaacctcttcgtgcaccctctcctgcctccgagagatctgagcccgacagccccctgtccagctgcggccacagccagcctccttgcctccatttcccgaattgcccaggaccccaggtgaggagtggaggctgagatgcaggggcatgtggaggggggtgggctgatcctgtaggagtggggagctggggcgctgaggggggattcagaaggggagtcctctggggtgtggcgggaggagggcatgacttttgacctgcttcatgttatgttccagctctgtgtccccaggaggcactgggggccagaagctggcccagctcccagaacttgcttctgccgagatgagtctccatgtcatctacctgcaccaggtgagtagaggggtgcccaaaggagaaatgtggagagaaggcaggtgaacaacatggagactgaggtggggtggagtctacggaagggtctagcagagtggcaggaggaggctgaaaagccctctgcctctagcccaggtgcttggccctgccctccttggggtgcagccctcattcctcctcctttccatgcagcttcaccagcagcagcagcagcaggagccgtggggtgaggctgcagcctccatcctgtccaggccctgctccagcccctcacagccaccctcgcctgatgaggagaagccatcctggtcaagtgacggtgaggagggtggggcctgcaggggacagagcctggtggacactgggcatcatggaactgcccagctgatggcctttttcaccaggctccagtcctgcctctagccccagacaacagtggggaacccagaaggcccggaatctgttccccggagggtttcaggtgaccacagacacccagaaggagcctgaccgggcctcttgcactgactgagacgactcctcagggtcagtattgcctcctgtgaggggagggagaaaggacggcataggtagttggtttggagtccgacttgaagcgatgggagcagtggtgggaatttggggtgatgggaggtggtcatctctggaatctagacccctggactgcttgccaagagccgtctcctcccacaggtaccctggcttcggcagccacaggagattggagggtggagtagaaaaacacaaggagtcattgttagaggccccatagatgacaggcccaggtgctttagttgggcaggacctgggagtcagtgaggaactcgccccgagaacagagaaaaggtaggcaaggagaggagatgctgatggcatctggaaacaagtcttagagatggtctgcacccagagggaataaggggagacatccccaactggaatgtgtcctggagcagctgcctgggaagaagtcctcgagtttcctcaaggtgggggacagaggtcaaggatgaggccgagctaaatggaagggcgacagtgaggcaggtgggctttaaggctgtggattcgtcatgctggcggctgccagcagcactttcaggttccttggggcttgtaggggatggggacttgtcagtggaaagacgggagggatgatgtttttggacttcagtacgggtgtgatgtcccaggaagtgggtgtggctccccatcctgtatgaaataagcagtaaagcttgctcatggctgttgcacatctctgtgactcttgtttctggcaggccccactcctggcagctgagtgctgcacctgccttctcgatcacgagcctgagaactgcacgggggagcagcccagactggctggaaaccatgttttcagagtgcagggtcaagtggcgtgtaggactctgtcaaaagaatgacccctttccccaccacatacccacaactgcacaggttaaaacagaaatcttgtcattttataattgtaatccacgccgggtgcagtagctcacacctgtaatcccagcactttgggaggctgaggcggttggatcacgaggtcaggagttcaagaccagcctggccaagatggtgaaaccccgtctttactaaaaatacaaaacctagccgggcgcggtggcaggcacctgtaatcccaactacttgggaggctgaggcaggagaatcacttgaacttgtggggtggaggttgcagtgagctgagatcacgccactgcactccagcccgggcggcagagggagactccgtttcaaaaaaaaaaaaacaaaaaaaaaaaactgtaatccacatgagctggggtaggcactttagtagttctcctaacatctggcacagtcccttatggtaaatcttcaataataaatacttgatttagagattagactttacaggtaagatactcctgagagaggcaagaggaatctaacattcgactaagaaacaggaagcgggtggcagtaggccctggggtaccgctgctgggaggggccttccagattaaggcggacccaggcccgaggcaacaggcctagagagggaaaagaggcgttttgctccttcctggaggaataatgctgaatccttgcagcctctggacagatgtgagaaggcaccacctcaagaggggaggagcggggctgatcctggtcgggcggacctgagtcgggcagccgctctcccggaactggaagggaaagccaggcggctctcaggggctgttggtgtctgagccgggagggtcgaacgcccagggcactgcgccccgcaactgacgctcctgcaaggaaaagctctgggtgcgtatgcggcttgtcacctcctgggtgcgcagcgtgagcccgaaaatgtcttcgtggtagcgttgctgatcctgtcggaaaagagcacagtggatcagaacccgactcggagaccttagcaggaaccccgcacgctcaggcccggcccgcccctccgcacccgcagcacgccgatgacgtcgccggcctcgtccagctccatgtcgccctccgtcgccaggatgcgctgcacggtctgcaggacgttggttgccatggtaacatcgccgcagacaaacatgtggccccgctcgaggcacagcacgcggtgcacctccgcagccagctccgtcctcaggatgtcctgcacgtaggtctgcggggcggcggggttagggcgggccctggtgggggtgggcgcgggggcgcagcccggggctgctggctggccctggacgtgaaagtctccggagcgggcctggtggggcctgcgtgccctggggcggtgtcaacaggggcagagccaaaggggcggggcaggggcgggaggaggcgggcctagaggggccggggcacaagggtgggccagagtgtgcaggggtggctgagtggtcgtgggaggccacgggagggccgtggttggtgtgccccgctggagagcgcgagtcctcccctctctccctatcttcaggttaccattgcgccctcagggtctcacaccttggggttgtcaggttcccgggagaaggcggtgaggactcggccaaacaccccgcgctgctgggcgttctgcacctcgtcgcggtagagatggtcaagttgggagcatcggcagccgaacaccaaagtcatgggagtgggctgcagccctgcaagcaaccccgcgcttgggaaggctcttctccggggcacagtgctagtggggcctccccacaggccaccgtcgcccagcctggcagcccagcgttttgggctgaaaccaccattactttggctgtttcatctctaagagagtgtagaatgctttcacagagaccctgcacagccctgatttacagagggaagggaagcgcgggtgaggtggtggcccctggtggagctgcgctagaatgcgcggcttcggactcagaattccatgccctttgcattgtgtgacatcgcagtccccttccccgctcccacttcatattctcccatacttataactctcctcccagtcacagccctcttcttttgattgacagaccaccctgggcaccccatgctcaatatgaacaccttgtagcatccttaggtcttggacagacctcggtcagctctggcacagtcaagaatccaccttgggcagttcttctttgagtcttagccctaatccctttgaaaattctattttcctttgtcctcaatccagtcaacacctactatgtaccaggcaccaggaagccagaagctcagggcccagcccttgcctttggtacctgccctccccttggtctcatgagcgtcttttcagctttgtggactttgtttcctgccctctctttcctatttcctgccttccagccccacccctctgtccctagattgtgtgactcccttcaggcagtcctttagtccccagcctcacctttgctctcaatgtcatgcagccgctcctgccagaatccccggaagggggcaatgccagtgcctggacccaccaggatgcagggcaagctgggatcgggtggcagccggaaggagggagccctggcaggagagacactccatcaggtcccctttgcctttcctgctccaccattctcaccatgcagggtgggtggagcaaggaggacccaagttcttcccatctcaaaaaaaaattaaaaaaaaaacaaaaaacaaaaaacaactctacttgctgaaactccttggatctgtggtttctggagattgcaccaaaggaaatatagttcattttggattgaagaatacttagatgactcaggggatttagaaaacgtgggaagggtgaaagacactttcagttcataatgggttcactaagtgtgtttattttaagtatccttaatagtggtatttagtttatgttcagtagatgggtacggtttatttgtagtttagccacctgggtggatttgaatcaccaggcccagctgatggcagcctaggaactgttctcagtcctaccaggacttttggttcctggctgcgagagcgggcaagacttctggacacagcatgaaggaagggtctcttaaaatccttcaccctcggtccgggcgcggtggctcacacctgtaatcccaagactttgggaggcggaggtgggaggatcgtgaggtcaggagctcgagaccagcctggccaacatagtgaaacaccgtctctactaaaaatacaaaaattagctgggcgtggtggtgggtgcctgtaatcccagctactcaggaggctgagacaggagaatatttttttttttttttttgagacagagtctggctctgtcgcccaggctggagtgcagtggcacaatcttggctcactgcaagctccacctcccaggttcacgccataggagaatctcttgaacccgggaggcggaggttgcagtaagccgagatcgtaccactgcactccagcctgggcgacagagcaagactccatctctgggggaaaaaaaaaccaaaaccttcaccttctttgagtccttggtgacaccaaggccaagggtggtcttaaccctaactagtagttctccctggattgagtgaggatttagtgactgtagttcccaggtgccatgctgcccaacatcagacagcccagggacatagagaggaacacagaagctttcagaaagccacagggccagccggtttgatcccagctctggctctgggagctatagtttcagggcagaactctgagtctaaatgaatgagagagccaaagcttagccagagttctgaagtgacctaatgacaccacacccttgacatgttacagagctccttcctgtttccagtgacacccctcaccagtgacactcctcaccaaagctgccaccctgaccctgggcagctccccaccaagtcttccatctcacttacccccggatgaagcagggcacagggtctccgggcttgagctggcttagccacgtggagcagactccatagtgcagggggcccagcccatctgggggtgggaaggagaggccggtgaggggccagagaggggccggtcccaaccctgctgtggccaggcctgctcctgcttgttgcctcaccctgagtcctgtatgccagcacagctacagtgaggtggatctctcctgggtgggtgctgggtgccgagctgactgagtagtaccggggctggagcagaggcagctgggtgaggagcagtggggcaggcagcgccaccgacgggaactgctccagcacctccagcagcgtggggcagcggaaccacttccactcctcgtagcgtcggggatcctggcggggcaggatgcagtgggttggaggccccatagcccttcctagtaacctcccttcttgacccctcccccactgagcctctttagggtttctccctgctcagttcaggccaatagagttttctctaagacctggagaatccagccatgaattcctccctgaggagctgggtcttaaagcaccagtgcatgtcggccaggagaagaaagtccaggggggactttgcatgggggtttcctgccactggggtccccccagctcatcccgtctctctagcccctgtgcctcattggggtggcccccaacctggctgagggcctccagctcctgctgttccctgggctcttctgccaaggtgctgagcagccgcaagagctgagggctg

SEQ ID NO: 69 - DNA, 12268 bp, Homo sapiens
gccaagtgaggtggctcatgcctgtaatctcagcactttgggaggtcaaggcgggtggatcacttgaggtcaggagttcgaaaacagcctggccaacacagcaaaaccttatctctgccaaaaatacaaaaattagctggacatggtgatgagtgcctgtaatcccaactactcagaaggctgaggcaggaaaattgcttgaacctgggaggcagaggttgcagtgagccaagattgtgtcactgcactctagcctgggcaacagagtgaggctctgtctcaaaaaaagaaaaaaagaaaagtggacagagaccaaggaacttgtggaataccattaagtagaccaacatatgcattacgattcccaaagaggggttagagaaaggggcaaaaagattatttgaagaaatggctgcaaacttcccaaatttgatgaaaggcactaatctacaaatccaagaatctcaataaactccaagtaaaataaatccaaagagactcacactgagacacattataatcaaactgttgaaagacagagaatcttgacagcagcaagagagaagcaactcataatgtacaagtgatcctcaataacactatcagctgaagtccaatcactctgagggaaaagaaaaaaaaaaagactactggccattttctcagcagaaaccctggatgccagaacgcagtgggataatacatttaaagtgctttaaaaaaaaaaaaaactgtcaggacaggcatgctggctcacacctataacccccaacactttgggacacaccaaggtagctgtgtagatcactggagcccaggagtttgagaccagcctgggcaacatggcaaaactttatctctacaaaaaaacccacaaaaattagttgcacctgtagtctcagctactcaggagcctgaggcaggaagatcacttgaacctgggagatcaaggctacagtgagccatgatcacaccactgcactccagtctgggcaacggagagagatcttgtctcttaaaaaaaaaattatgcgaaatctactctgcctgtgttctataaagggaacaacaaagcctggatgacagcatatctgtttaccctacagtttgctgaatatgttaagctcattattgatacctacccctcagaaaaaaagattcctatcaaaatattattgcaggctgggcacagtggctcatgcctgtaaccccaacatttaaggaggccaaggcaggaaaatcacttgaggccaggagttcgagaccagtctaggcaacacagcaagactcagtctccattaaaaaaaaaattactgaccattgatagtgcaccttgtcaccctatagctctgatcgagatgtacaaggagattaatgttgttttcatgcctgctaacacaaaatcttttccttagcctgtggatcaagaagtacttttgactttcaagtctattatttaagaaatatattttgtaaagttatggcggccatagatagcaattcctatgatggatctgggcaaagtcaattgaaaaccttttggaaaggattcaccctcctagatgccattaagagcatttgtgattcatgggaggaggtgaaaatatcaacattaactggagtttagaagaagttgattccaaccctcatggttgatgttgaggagtctaagactttatggagggatgtaactgcagatgtggtagaaacagcaagagaactagaattggaagtggagtctgaagatgtgactgaattgctacaatctcatgataaaactttaagagatgaggagttgcttcttctagacaaagtggttttttgagatgacatctactcatggtgaagttgctatgaacattgttgaaatgacaacaaaagatttaaaatatcatataaacttaattgacaaagcagcagcagggtttgagaggactaactccaattttgaaagaagttctaccgtgggtaaaatcctttcaaacagcatcacatgctatagagaaatctttcatgaaaagcatagtcaattgatgcagcaaacttcattgtcttattttatgccaccccaaccttcagcaaccaccaccttgatagtcaacaaacatcaaggcaagaccctccaccagtaaaaatatgacttgctgaaggctcagatgatcatcaacatttttaagcgatataatattttcaaattaaggtatgtacattgttttttaaacatgttattgcacacttaagagactacagtatagtgtaaacataactttttctttttttttttttgagatggagtttcactcttgttgcccaggctggagtgcaatggcatgatctcggctcactgcaacctccacctcccaggttcaagcaattctcctgtttcaacctcccaagtagctgggattacaggtgcccaccaccacgcttggctaatttttgtatttttaatagagacgggtttcaccatgttggccaggctggtctcaaactcctgacctcaagtgatccacccacctcggcctcccaaagtgctaggattacaggcatgagccaccacacccggcctagtatttttttttttaagagatggggtcttaccatgttaccaaggttggtctcaaactcctgagctcaagcgatccacctgcctcagcctcccaaagtgctgagattacaggcctgagccaccatgccggcccaacataacttttatatgcactgcaaaacaaaaaaatccctgtgactcactttattatgatattggctttattgtagtggtctggaacccaacccacagtatcttccaagtttgcctgtacattttagctatctattattaaacaacttagtggcttaaaactacaataattttatttatttgcttgtaattttgcaatgtgggctcaaatagcctttctttgctccacacgcagtcacctgaggtggctccagtgggctggagaatccactttttaaatggccttcttcacgtggctggcaaaagttggtgttgactgctggctgggagttcaactgaggctgttggcccaaacctcagttcttcttcacatggttggttgggcttttcacaggcagtaagtctgagaagtcaaacttctaacacagcagctggcttcccccgaatgcaaaaacagaagctatcaggccttcttaaggcatagtcccaaactggcataacatcacttccaacgcattctactattgattaaagcaagtgacaggcccaatcagactcaagagaagagaactcctaaaggtgcaaatattgggaagcctggttcatttggggccaccaaagtagcagtgtactgtaagatagtcaccctgccaagtgttctgtagctgtatatttgtaattacttctaattgtattgagttttaaaagtaatctctaaaaaaaaatcagtgtttccatatcaaaaatctattgatgtttataatagcatccaacatatgcaagtgttagctcataccactaattattactaaatcagtattatagttctttgcctcctattttcgccatatctgtcaggtacattcataatcgttccaaatgagcagtcactgaaataatttcaggttattgtatctttctgaaactataatttgttgtttagaaagtaatctgcatattgagagactttgtaagggttcaaacataatcaaactccacctttctgaccagtaacttttttccctgaagatgaatgcttttaacttcaagaaacagaacacccaagcaacagacttagagtctaaacagtaaagacctttaatcatctttttttttttttttttgagatggagtctgtcgcccaggctagagtgaggtggctccacctcggctcactgcaacctccacctcccggattcaagcgattctcctgcctcagcctccctagtagctgggactacaggtatgcaccaccacgcccgcctagttattttgtttttttgttttttgtatttttagtagagacaggatttcaccatgttggccaggctggtctcgatctcttgacctagttatcgagaccacctcagcctcccaaagtgatgagattacaggtatgagccactgcacccggccaagacctttaattaacttacacaacaaagtctggagataggcagttccaagcatggtacagcagctcaatgatatcatcaagtatttgggtgttttctatctttgccctcaaccatcttcagcacgtgagtttttctttcctttttttttttttttttgagacggagtctcgctcttgttgcccaggctggagtgcagtggcacaatcccggctcactgcaacctctgcatcccgggttcaagtgattctcctgcctcagcctcccgagtagctgggattacaggcgcccaccaccacgcccggctaatttttgtatttttagtagaaatggggtttcaccatgttggccaggatggtctcgacctcctgatctcgtgatccacccacctcggcctcccaaagtactgggattacagacctgagccaccgcgcccggcctgcacgtgagcttttcatctggaaacttgtcccctcatggtcagtcctcacaccaccccacttacagaagaaaaaaatggaaaggtgaagtctcctctggaagcttcgtctttttatctgggaggaaaatatttcccagaagctgccttcttttaatttctgtcagactctagactaccctcaaatttcactggacctgcgattacaatattacctagcaataagaatcaaaagaatcgaacatcattgagtgggaaaaatcctctgcaagtacagccaagccttttctgaggctatttttaaacttacaaatcagaggacaatcgcgacattagaggaaaattacccaggtttacgccatcactaacgatgatagcttacgatgatagctaacccagctcttcaacttcctttcaatctccagaaaaggctctctgcgtgctaatggtaacgtggctttacagatttttacccacttcaaatatggccgccaagctccgttctcttttaccgcctgatctgcggctacaattctggcttcatgcccgcctccaaaagtgcttcctctcgaggggttgtggttcttactgcgcaggcgcaaaagcaagtcctcttccgggcaaaatggcgatgggactaatgtgcggacgccgggagcttctgcgcttgctacagtccgggcgtcgggtaaggatgccccggggcagagcaccgggatgctgccctgacccagtgaaccaggccccaggacagctcgtgctaggggtatcagcagacgctgacctgctcaccgggacctgaatgtcatgacctcgggtcatgtgaggacgcgctagggttagtccccgacactatgggcccagcagcccggtgtcagcttctggaattggcttggctcctggcgagagcacctcggcctcgttctcagggccctccgatgtgggtctgcgataactgagatgcggggaacccaggttcgagcttcgctctgcaggcaccacccgctgcatgccttcgggctagcggtctgcgcgcggtgatagcaatgtcctcccctgtagtggccgagctgcctgcttcttggggagttagcataatgaatcccgtttgcacccacgcgaggacttctgctcccggtaaaggggctccatcatccttttacacgctcaggtccacagcgtcgcagggccctcgcaatggcttgggaaaccgctgaccacacggctcctattcccagcagccccgtgctgctgtcgcccacactacctcttccttgcggcttccggcccccgcagcctcagtacctctgctatctcttttgcagaagtccaggtaagaggcctttcgttcctgcaatattaggagtggtgtttcctggttggtttcatattttgttttgtttgggagcagggggaatatggagcagagttcttgtccacgctccacacagctctccaaaatgatagcatctctgcttaggatggattttcaattcagtggggaaatgattgaaagtacaacaggagagatgttatatttggttttctgagctgttttaaagaaaagcaattgtttcatgttaatatatggcaaaaatcatgatagtgatattcaaatggctgaagtttggaaaacagtgataaaagaaataacttcccagcatgaagggaagtcatggattcttactcaaagtaacttctcttcctaactattgataaaaatgagatgtcctttttaagcttgaaatctgcagacactaggctaacctggaagaacaagaagtagagagaacagaacccagtactggttattataaaaagatctcacttgctttgtgttcgctactgaataaatataatacaaggctttctttcacacaggttcaggcccctcctgttgttgctgcaactccctcacccacagcagtacctgaggtggcttctggagagactgcagatgtagtccaaactgctgcagagcagagcttcgctgaactggggctggggtcatacaccccagtgggactgatccagaatttactggaatttatgcatgttgatctgggcctaccttggtggggggccattgctgcatgtaaggggaatataccctggacatgggttagggatttaacctcatagatggcaattctttgaatggattcaggaagtagttgcagaagctctggggtcagaagagcagatgatttcaaatgagcaatagaggttcatgatacctagatgcactctgcctatatttcttaaagagcattataaaaccaccagatcatctgggattcaagaagtgtagatatttgaatacaaacatggggttagagtcaggggaccttattaacagtcatgaagctatcctggtttagaacagaggttcaggtcaggcacttaaacccctaaattgggaagccactagcattgcttttgtaaaggctagaactctgctttgaattatgtgtctttctgccacgttgctccatcaattatcttttctcccctgtgtcttcagcatttccctcctcactgccctaccccgaacatgtaaacatgctcaggcacacccatgtgttacctgggggaaggtttcttcccttcatccttagttccccttcacttactatcctatcttcttcctttgatggctgttatttattttgttgttgttaatttttgtggatacctagtaggtgtatatatttatgggctacatgagatgttttgatagaggcatgcaaggtgtaataatcacattatggagaatgagatatccatccccttaagcatttatcctttaagttacaaacaatccaattacacttttattttattttttattttatttatttttttaaacggagtcttgctctgtcacccaggctggagtgcagtggtgcagtctcagctcactgcaacctccacctcccaggttctagcgattctcatgtctcagcctctcaagtagctgggactacaggtgtgccaccacacctggctaatttttacgttctttatttaaaaatatgctattattactgactatagtcaccctgttgtgcaatcaatagtagatcttattctaacttttttttacccattaactattcccaaccctgactacccttcccagcctctggtaccttccttctactctctgcccatgatttcatttgttttgatttttagatctcacaaataagtgagaacatggcgatgttcgtctttctgtgcttgccttatttcacttaacatagtgatctccagttccatccacgttgtcacagatgactgggtttcattcttttgatagctgttacttaaaagactgctctgcatccaattagcctacttctttccatttactccctcagccgtctggcttttactcatatcacctcattcgaactgccagtaacataattgctaaatccactcctgtcagctttttgtttgaggaaacaaacaggattcctaatcatctgcttagagaagttaatgccatacttttgtgatgccaaattagagaactgagccttaaagcaactaattcattcccctgaccttatttctgggcctcttaggcatgagtcatagaatggacaaggcaagaataagaccctttcagtaaggacctaaaagccttcaaccttctagctgcagaactgctttaatttcactccaatcctagtttgtattttccaggtacagtctttgcccgctgcctgatttttcctctcatcgtgacgggccagcgagaggcagccaggatccacaatcacttgccagagatccagaagttttccagtcgaatcagagaggccaagttagcaggagaccatattgagtgtgagtcagttgcagaatgagcgtgggagaagtccacatttgcacttttccttacattctgctgggggaaaggaacaatgtaaatcagaagttgccacagtcgggaaagttctaaaggtttatctgtttcttagacctaatgctcccaaggagtggccagggttggttagaaatttcacaggccaggtagataatgaggatgttcacctccactgatgtaactgttaccccaaccattaatttcccctcacctcacagattacaaggcttcctcggagatggcactttaccagaaaaaacatggtattaaactctataaacctctcattctccctgtgactcaggtgagcaaaaacatttccttccttatttcatccagtacccatgaaatttcctctctgtgtttcatgtgtcccaggtcccccaaaaaacaggtggtggtggattatacatggctttcagtagtggggtgatgaaaatgttctctctggtaaagcatgctgacactgtttatcttgtgtaataggccccaatcttcatctccttcttcattgctttgagagagatggccaaccttcctgtgcccagcctgcagacaggtggcctctggtggttccaggatctcacggtatccgatcccatctacatattaccactggcagtcactgctacaatgtgggctgttcttgaggtaagcccagattggccaagtgccaggcctgcaaagtgaactggggttggagggtaaagtagttgtacagaatggtcatccttcacttgctggagaaagagttgatgggtaagagattagagacagattcactgaaactgacagctttcccgacttttccaccccacttcttttggcagctaggtgctgagacaggtgtgcaaagttctgaccttcagtggatgagaaatgtcatcagaatgatgcccctgataaccttgcccataaccatgcatttccccacggtatgtaatgccttatgggctggctccaaggccttctgcctagcctagccacctagcaagctgaccagggatacagcttctgagtcccttctctgtgttctcacccaggcagtgtttatgtactggctctcctccaatttgttttccctggtccaagtatcctgtctccggattccagcagtacgcactgtacttaaaatcccccagcgtgttgtacatgacctggacaaattacctccacgggaaggcttcctagagagcttcaaaaaaggtaagggctcatcctctgtgaaaaaggactagggaaaggggtctaaaaataggaatgcaactgactctcttgcttctctttacacaggctggaaaaatgctgaaatgacgcgtcagctgcgagagcgtgaacaacgcatgcggaatcagttggagctagcagccaggggtaaatagtcctttcaggccaaattctgtcttttgtttcttcctttctgttcttcgttgaaatttgttttctcttctcccctcaggtcctttacgacagacctttacccacaaccctctcctacaacctggaaaggataaccctcccaatatccctagcagcagcagcaaaccaaagtcaaagtatccctggcacgacacacttggctgacttatgttctgtgcgcattctggcaggaattctgtctcttcagagactcatcctcaaaacaagacttgacactgtgtccttgccccagtcctaggaactgtggcacacagagatgttcattttaaaaacggatttcatgaaacactcttgtacttatgtttataagagagcactgggtagccaagtgatcttcccattcacagagttagtaaacctctgtactacatgctgcttcctgatacttattgaacagggaaatcagtgtgcacttcagaaaactgaagaatacccagcattttgggaggccgaggtgggtggatcacctgagatcaggagtttgagaccagcctggccaacatggggaaacgccatctctgctgttttacaaaaatagccacacgtggtggtgcacacctgtagtcccagctactcgggaggctgaggcaggagaattgcttgaatccgagaggcggaggttgcagtgagccaagatcgcaccaccgcactccagcctgggcaatagagggagactgtctcaaaaaaaaaagaaaactgaagaatagagtgagtcatgattgcttttgctggcccatggccttggaaaatataatgttttaacctggcattaagggtttaaacttccacccaggcgcagtggctcacgccagtaatcccagcacttttgggaggccaaggcgggcggatcacgaagtcagcagatcgagaccatcctggccaacatggtgaaaccccgtctctactaaaaaaaaaaaaaaaaaaattagccgggcatggcggcgggtgcctgtattcccagctacttgggaggctgaggcaggagaatggcgtgaacccaggaggcagagcttgcagtgagccgagattgcgccactgcactccagcctgggcaagagagtgagactccttctcaaaaaaaaaaaaaaaaaaaaaaaaaaaaaaacagtttaaacttccaacccatgcatgtgttgttctatgcacatttggattgcagtctagaggtgtggctgataagttgaatgttgagattgtatctaaatatagtaaccgcacttcttgatcccaagattactttaaaaatttcaagaagtagatgtgtgcaaattcttagtgataattaagaatgaaagttccaggctgggcaaagtggctcacacctataatctcagcactttgggaggctgaggtgggtagatcacttgagtccaggaatttgagaccagcctgggcaacatggcgagaccttgtctctgctaaaaagttagctgagcatggtggtgcttgtccatagtcccagctacctgggaggctgaggtgggaggatagcttaagcccaggaggttgaggctgcagtgatccaagatcatgctgctatactccagccttggctacagagcaagatcctgtctcaaaaaggaagttcatgtcatttttatgtaacaatccaacatttgactagagcagtttaagtgttctgttgtctgcctttgtgtagagcctggtttatcagccttcagcagctagcttgagagagaaaagatggatatactttcaagcataagattgattttagtctttgtgtttctaggctaatgggagctgtcctagagatagatactatataaaatgaagccactcagactttaggaacataaacttttattgtcatccagcacctgtgatagtttcatgtctctctaaaggagacaggaaattggagcattgtgggcccttttaaaagaaaagaggagtaggtaggcacacccaggtgcttctaaaacaaccaagcccaaacctgacatgctcctccccacagtcaccttcattgtcccctttaaaagtctggaacagtatgtagcaaaacaaataaattacttttcatttcaaaaagtaagttcaaaggttgaagctgcctaggccaggcttctggacaggtgcctccaaagaagtgagctttccttttcaacttccttagctctagccagtagaccagaaacccctgctttccacatcaggattccagatggtgtttagttagatttgggatcccgttgcttgggcatctctcctccatcttccaaatccatttctgcagcaactgacatacacaggacctggaggtaccttgtggcagaccctacaaagagaactttgagttggaattgagaagaggtcagctgggctgagttcaagtgtcactgaatggaact

SEQ ID NO: 70 - DNA, 2641 bp, Homo sapiens
ctttttaagcgcctcccgccagcctctgctgtggctcgcttcgccgcgctccctccttccccgccttccatacctccccggctccgctcggttcctggccaccccgcagcccctgcccaggtgccatggccgcattgtaccgccctggcctgcggtgagtgacccccggcccggggcccacccgcaccttccgctgcgctcgccccctcggggctgccagtggcgctctcctgctctcagcctccgccaggtttcccatcctaggcggaggcgggcaggggcgactgctgtgggtccagcctcccgcgccgcgcgtctcttgggagggcagccggccggtgctcctcgtttccgcctgcacctccccttctctgcctcgctcgcctctgaccgcgcgatctctatctgccactctcagaacttcctctctctcctcgctcctctctgctgagccaggtctccgcatatcctcctttccttcccagatacctccctcggacctctaacgggctctcagccagcgccccagggtacttcgagaggcagcagggccctggggacaagggcttaactggcatgggctgagccccttgggctggccatcatgccgtagcatccagaccctgcgagtgcttagtggagatctgggccagcttcccactggcattcgagattttgtagagcacagtgcccgcctgtgccaaccagagggcatccacatctgtgatggaactgaggctgagaatactgccacactgaccctgctggagcagcagggcctcatccgaaagctccccaagtacaataactgctggctggcccgcacagaccccaaggatgtggcacgagtagagagcaagacggtgattgtaactccttctcagcgggacacggtaccactcccgcctggtggggcccgtgggcagctgggcaactggatgtccccagctgatttccagcgagctgtggatgagaggtttccaggctgcatgcagggccgcaccatgtatgtgcttccattcagcatgggtcctgtgggctccccgctgtcccgcatcggggtgcagctcactgactcagcctatgtggtggcaagcatgcgtattatgacccgactggggacacctgtgcttcaggccctgggagatggtgactttgtcaagtgtctgcactccgtgggccagcccctgacaggacaaggggagccagtgagccagtggccgtgcaacccagagaaaaccctgattggccacgtgcccgaccagcgggagatcatctccttcggcagcggctatggtggcaactccctgctgggcaagaagtgctttgccctacgcatcgcctctcggctggcccgggatgagggctggctggcagagcacatgctgatcctgggcatcaccagccctgcagggaagaagcgctatgtggcagccgccttccctagtgcctgtggcaagaccaacctggctatgatgcggcctgcactgccaggctggaaagtggagtgtgtgggggatgatattgcttggatgaggtttgacagtgaaggtcgactccgggccatcaaccctgagaacggcttctttggggttgcccctggtacctctgccaccaccaatcccaacgccatggctacaatccagagtaacactatttttaccaatgtggctgagaccagtgatggtggcgtgtactgggagggcattgaccagcctcttccacctggtgttactgtgacctcctggctgggcaaaccctggaaacctggtgacaaggagccctgtgcacatcccaactctcgattttgtgccccggctcgccagtgccccatcatggacccagcctgggaggccccagagggtgtccccattgacgccatcatctttggtggccgcagacccaaaggggtacccctggtatacgaggccttcaactggcgtcatggggtgtttgtgggcagcgccatgcgctctgagtccactgctgcagcagaacacaaagggaagatcatcatgcacgacccatttgccatgcggcccttttttggctacaacttcgggcactacctggaacactggctgagcatggaagggcgcaagggggcccagctgccccgtatcttccatgtcaactggttccggcgtgacgaggcagggcacttcctgtggccaggctttggggagaatgctcgggtgctagactggatctgccggcggttagagggggaggacagtgcccgagagacacccattgggctggtgccaaaggaaggagccttggatctcagcggcctcagagctatagacaccactcagctgttctccctccccaaggacttctgggaacaggaggttcgtgacattcggagctacctgacagagcaggtcaaccaggatctgcccaaagaggtgttggctgagcttgaggccctggagagacgtgtgcacaaaatgtgacctgaggccctagtctagcaagaggacatagcaccctcatctgggaatagggaaggcaccttgcagaaaatatgagcaatttgatattaactaacatcttcaatgtgccatagaccttcccacaaagactgtccaataataagagatgcttatctattttacacaagaaaaaaaaaaaaaaa

SEQ ID NO: 71 - DNA, 3060 bp, Homo sapiens
gccgggtttgggggttgggacctccggctgcaggtccgcctgggccagacgcgcgagcgcaagcagcgggttagtggtcgcgcgcccgacctccgcagtcccagccgagccgcgacccttccggccgtccccaccccacctcgccgccatgcgcctccgccgcctagcgctgttcccgggtgtggcgctgcttcttgccgcggcccgcctcgccgctgcctccgacgtgctagaactcacggacgacaacttcgagagtcgcatctccgacacgggctctgcgggcctcatgctcgtcgagttcttcgccccctggtgtggacactgcaagagacttgcacctgagtatgaagctgcagctaccagattaaaaggaatagtcccattagcaaaggttgattgcactgccaacactaacacctgtaataaatatggagtcagtggatatccaaccctgaagatatttagagatggtgaagaagcaggtgcttatgatggacctaggactgctgatggaattgtcagccacttgaagaagcaggcaggaccagcttcagtgcctctcaggactgaggaagaatttaagaaattcattagtgataaagatgcctctatagtaggttttttcgatgattcattcagtgaggctcactccgagttcctaaaagcagccagcaacttgagggataactaccgatttgcacatacgaatgttgagtctctggtgaacgagtatgatgataatggagagggtatcatcttatttcgtccttcacatctcactaacaagtttgaggacaagactgtggcatatacagagcaaaaaatgaccagtggcaaaattaaaaagtttatccaggaaaacatttttggtatctgccctcacatgacagaagacaataaagatttgatacagggcaaggacttacttattgcttactatgatgtggactatgaaaagaacgctaaaggttccaactactggagaaacagggtaatgatggtggcaaagaaattcctggatgctgggcacaaactcaactttgctgtagctagccgcaaaacctttagccatgaactttctgattttggcttggagagcactgctggagagattcctgttgttgctatcagaactgctaaaggagagaagtttgtcatgcaggaggagttctcgcgtgatgggaaggctctggagaggttcctgcaggattactttgatggcaatctgaagagatacctgaagtctgaacctatcccagagagcaatgatgggcctgtgaaggtagtggtagcagagaattttgatgaaatagtgaataatgaaaataaagatgtgctgattgaattttatgccccttggtgtggtcactgtaagaacctggagcccaagtataaagaacttggcgagaagctcagcaaagacccaaatatcgtcatagccaagatggatgccacagccaatgatgtgccttctccatatgaagtcagaggttttcctaccatatacttctctccagccaacaagaagctaaatccaaagaaatatgaaggtggccgtgaattaagtgattttattagctatctacaaagagaagctacaaacccccctgtaattcaagaagaaaaacccaagaagaagaagaaggcacaggaggatctctaaagcagtagccaaacaccactttgtaaaaggactcttccatcagagatgggaaaaccattggggaggactaggacccatatgggaattattacctctcagggccgagaggacagaatggatataatctgaatcctgttaaattttctctaaactgtttcttagctgcactgtttatggaaataccaggaccagtttatgtttgtggttttgggaaaaattatttgtgttgggggaaatgttgtgggggtggggttgagttgggggtattttctaattttttttgtacatttggaacagtgacaataaatgagacccctttaaactgtcttattttccaccagattgagaaccagatgttctctacacactatcactgttcaatagagctttcttcagtgatggaaatgctctgtaatctacactgttcagtacaggtagctacggagcatctgaaatatggctagaaactacatttttgttttgattaatttaaatagccatacagttgctaccatactggtcacggcagctgtagactgactgggtccatagttcatcacctcaaaattctttcaaaatttattatctctttctctccttacatgtttatttcccaggcctaccctggtgattagaacagctgaagggcctttcttgttaggctgtccatgccctaaggatgggttcctgtttatccttgccacgcagctgagcttactgcatgtttatatctcccaaggactgttctctgctcagaaatgccctgtcaagggtgtggcatcacgcagtttcatccaagttgtttcaggaattgctgacactgctgggtgcagttctatcccctaaagcctagggtgtggccctttaacttccccttcagtagaactgggaaaggcagtaccattcctagttatgagtgaagcatccactttcttttgtaacaatgaggaacagaaaggataagactgaagagtgatcttttgtccaactaaaccatttatctccttttgtaggtaaattcaaatcctgcccagttatagttttcagtcactggagaattccaggtaggagccctactttaggtgatcctaggaactcctatgttcagaaaagaattttcttcctactatataattacagtatttagctgtcaattttaagatgaatttggtagagccttatagtaaagtatgtatcttggtcacacacaaagcttggaaaaagtaaaagatgtctaaaccataatcttgtaactcataacatctgggctggggcccggggatctaattgtttagagagccccaaaagtggctcagatgtaaagccagggttaagaaccatctgccttggaagatttaagggaaacatataaacttgtacaaaggacaaaaaaa

SEQ ID NO: 72 - DNA, 2021 bp, Homo sapiens
gcagggatttggcaacctcagagccgcgaggaggaggcggagtcgcggagagtttgagtatttccgtccaatcaaaaggagactgtaagaggaggaggaggaggagatgactggggagcgggagctggagaatactgcccagttactctagcgcgccaggccgaaccgcagcttcttggcttaggtacttctactcacagcggccgattccgaggccaactccagcaatggcttttgcaaatctgcggaaagtgctcatcagtgacagcctggacccttgctgccggaagatcttgcaagatggagggctgcaggtggtggaaaagcagaaccttagcaaagaggagctgatagcggagctgcaggactgtgaaggccttattgttcgctctgccaccaaggtgaccgctgatgtcatcaacgcagctgagaaactccaggtggtgggcagggctggcacaggtgtggacaatgtggatctggaggccgcaacaaggaagggcatcttggttatgaacacccccaatgggaacagcctcagtgccgcagaactcacttgtggaatgatcatgtgcctggccaggcagattccccaggcgacggcttcgatgaaggacggcaaatgggagcggaagaagttcatgggaacagagctgaatggaaagaccctgggaattcttggcctgggcaggattgggagagaggtagctacccggatgcagtcctttgggatgaagactatagggtatgaccccatcatttccccagaggtctcggcctcctttggtgttcagcagctgcccctggaggagatctggcctctctgtgatttcatcactgtgcacactcctctcctgccctccacgacaggcttgctgaatgacaacacctttgcccagtgcaagaagggggtgcgtgtggtgaactgtgcccgtggagggatcgtggacgaaggcgccctgctccgggccctgcagtctggccagtgtgccggggctgcactggacgtgtttacggaagagccgccacgggaccgggccttggtggaccatgagaatgtcatcagctgtccccacctgggtgccagcaccaaggaggctcagagccgctgtggggaggaaattgctgttcagttcgtggacatggtgaaggggaaatctctcacgggggttgtgaatgcccaggcccttaccagtgccttctctccacacaccaagccttggattggtctggcagaagctctggggacactgatgcgagcctgggctgggtcccccaaagggaccatccaggtgataacacagggaacatccctgaagaatgctgggaactgcctaagccccgcagtcattgtcggcctcctgaaagaggcttccaagcaggcggatgtgaacttggtgaacgctaagctgctggtgaaagaggctggcctcaatgtcaccacctcccacagccctgctgcaccaggggagcaaggcttcggggaatgcctcctggccgtggccctggcaggcgccccttaccaggctgtgggcttggtccaaggcactacgcctgtactgcaggggctcaatggagctgtcttcaggccagaagtgcctctccgcagggacctgcccctgctcctattccggactcagacctctgaccctgcaatgctgcctaccatgattggcctcctggcagaggcaggcgtgcggctgctgtcctaccagacttcactggtgtcagatggggagacctggcacgtcatgggcatctcctccttgctgcccagcctggaagcgtggaagcagcatgtgactgaagccttccagttccacttctaaccttggagctcactggtccctgcctctggggcttttctgaagaaacccacccactgtgatcaatagggagagaaaatccacattcttgggctgaacgcgggcctctgacactgcttacactgcactctgaccctgtagtacagcaataaccgtctaataaagagcctacccccaactccttctgcaaaaaaa

SEQ ID NO: 73 - DNA, 1751 bp, Homo sapiens
ggggcggggcgtcgcgggctcgtccgtgatgctctgggatcccgcgcttccgagactcgcagtctacgcgagctgcctgtttttttcctgcttggacgcgcatgagggccccgtccatggaccgcgcggccgtggcgagggtgggcgcggtagcgagcgccagcgtgtgcgccctggtggcgggggtggtgctggctcagtacatattcaccttgaagaggaagacggggcggaagaccaagatcatcgagatgatgccagaattccagaaaagttcagttcgaatcaagaaccctacaagagtagaagaaattatctgtggtcttatcaaaggaggagctgccaaacttcagataataacggactttgatatgacactcagtagattttcatataaagggaaaagatgcccaacatgtcataatatcattgacaactgtaagctggttacagatgaatgtagaaaaaagttattgcaactaaaggaaaaatattacgctattgaagttgatcctgttcttactgtagaagagaagtacccttatatggtggaatggtatactaaatcacatggtttgcttgttcagcaagctttaccaaaagctaaacttaaagaaattgtggcagaatctgacgttatgctcaaagaaggatatgagaatttctttgataagctccaacaacatagcatccccgtgttcatattttcggctggaatcggcgatgtactagaggaagttattcgtcaagctggtgtttatcatcccaatgtcaaagttgtgtccaattttatggattttgatgaaactggggtgctcaaaggatttaaaggagaactaattcatgtatttaacaaacatgatggtgccttgaggaatacagaatatttcaatcaactaaaagacaatagtaacataattcttctgggagactcccaaggagacttaagaatggcagatggagtggccaatgttgagcacattctgaaaattggatatctaaatgatagagtggatgagcttttagaaaagtacatggactcttatgatattgttttagtacaagatgaatcattagaagtagccaactctattttacagaagattctataaacaagcattctccaagaagacctctctcctgtgggtgcaattgaactgttcatccgttcatcttgctgagagacttatttataatatatccttactctcgaagtgttccctttgtataactgaagtattttcagatatggtgaatgcattgactggaagctccttttctccacctctctcaacacactcctcaccgtatcttttaacccatttaaaaaaaaaaaaaagctaaaattagaaaaataactccctacttttccaaagtgaattttgtagtttaatgttatcatgcagcttttgaggagtcttttacactgggaaagtttgtagaaattttaaaataagttttatgaaatggtgaaataatatgcatgattttaagtattgccatttttgtaatttgggttattatgctgatggtatcaccatctcttgaaattgtgttaggtttggttattttgtctggggaaaaaatatttactggaaaagactagcagttagtgttggaaaaacctggtggtgtttacaatgttgctaatcattacaaaacattctatattgaagcactgataataaatatgaaatgcaaaacctttttaattctatggtcaaaactaaaaaaaaaaaaaaaaaaaaaaa

SEQ ID NO: 74 - DNA, 1184 bp, Homo sapiens
gcaggaccgtcattgacgccatgagcgcgctgctgcggctgctgcgcacgggtgccccagccgctgcgtgcctgcggttggggaccagtgcagggaccgggtcgcgccgtgctatggccctgtaccacactgaggagcgcggccagccctgctcgcagaattaccgcctcttctttaatattgatgatgttaagaagttcaaaccgggttacctggaagctactcttaattggtttagattatataaggtaccagatggaaaaccagaaaaccagtttgcttttaatggagaattcaaaaacaaggcttttgctcttgaagttattaaatccactcatcaatgttggaaagcattgcttatgaagaagtgtaatggaggagctataaattgcacaaacgtgcagatatctgatagccctttccgttgcactcaagaggaagcaagatcattagttgaatcggtatcatcttcaccaaataaagaaagtaatgaagaagagcaagtgtggcacttccttggcaagtgattgaaacatctgaaattctgctgtcaagattcccatctctaaggactccaagtgctagagacaagggggtctatgagcatttactgacttcctgttaaaacttcattttttcaaactttttgagctatgcaatatataaataaacagtaagaattttaaattactctcctttggacatttattgatataaaaagaagattttggccaggcacggtggctcatgcctgtaatttcagcactttgggaggccgaggtgggcagatcacaaggtcaggagttcaagaccagcctggccagtatgttgaaaccccatctctattaaaaatacaaaaattagccaggcgtggtggtgcatgcctgtagacccagctactcaggaggctgaggcagaagaactgcttgagcccaggaggcagaggttgcagtgagcagagattgtgccactgcactccagcctaggcgacagagagagactccgtctcaaaaaaaaaaaaaagattttgtttcatttcatagcacaaatttagaggcattgagttgaccatttctagtttctatacctgaaggaacccattgattttaccagtttttatttctgtagattggatgtaaaaatcacagattcaataaattaataaactttgtgtaaaaaaaaaa

SEQ ID NO: 75 - DNA, 759 bp, Homo sapiens
gagacgctcagcgggctatatactcgtcggtggggccggcggtcagtctgcggcagcggcagcaagacggtgcagtgaaggagagtgggcgtctggcggggtccgcagtttcagcagagccgctgcagccatggccccaatcaaggtgggagatgccatcccagcagtggaggtgtttgaaggggagccagggaacaaggtgaacctggcagagctgttcaagggcaagaagggtgtgctgtttggagttcctggggccttcacccctggatgttccaagacacacctgccagggtttgtggagcaggctgaggctctgaaggccaagggagtccaggtggtggcctgtctgagtgttaatgatgcctttgtgactggcgagtggggccgagcccacaaggcggaaggcaaggttcggctcctggctgatcccactggggcctttgggaaggagacagacttattactagatgattcgctggtgtccatctttgggaatcgacgtctcaagaggttctccatggtggtacaggatggcatagtgaaggccctgaatgtggaaccagatggcacaggcctcacctgcagcctggcacccaatatcatctcacagctctgaggccctgggccagattacttcctccacccctccctatctcacctgcccagccctgtgctggggccctgcaattggaatgttggccagatttctgcaataaacacttgtggtttgcggccatctccttggttaaaaaaaaa

SEQ ID NO: 76 - DNA, 2238 bp, Homo sapiens
gcctgcgcggagggagccgcgagacaggtgcgcatgcgcagtgcgcgtctgcgagaccgacttggacggagccgagctgaggctcggcttcctgctgatggtcagggttttggcaactccccggtgtgagaggggtagggagtgctcccggcggcgacggggccgagttcaccagccgccggggcagtagtcgaaggcccggcgcggcatgtcctgggtgccgcggtgcgggcagtgaacgcgcgccgggcgggatgggccggcgccgggcgccagagctgtaccgggctccgttcccgttgtacgcgcttcaggtcgaccccagcactgggctgctcatcgctgcgggcggaggaggcgccgccaagacaggcataaagaatggcgtgcactttctgcagctagagctgattaatgggcgcttgagtgcctccttgctgcactcccatgacacagagacacgggccaccatgaacttggcactggctggtgacatccttgctgcagggcaggatgcccactgtcagctcctgcgcttccaggcacatcaacagcagggcaacaaggcagagaaggccggttccaaggagcaggggcctcgacaaaggaagggagcagccccagcagagaagaaatgtggagcggaaacccagcacgaggggctagaactcagggtagagaatttgcaggcggtgcagacagactttagctccgatccactgcagaaagttgtgtgcttcaaccacgataataccctgcttgccactggaggaacagatggctacgtccgtgtctggaaggtgcccagcctggagaaggttctggagttcaaagcccacgaaggggagattgaagacctggctttagggcctgatggcaagttggtaaccgtgggccgggaccttaaggcctctgtgtggcagaaggatcagctggtgacacagctgcactggcaagaaaatggacccaccttttccagcacaccttaccgctaccaggcctgcaggtttgggcaggttccagaccagcctgctggcctgcgactcttcacagtgcaaattccccacaagcgcctgcgccagccccctccctgctacctcacagcctgggatggctccaacttcttgccccttcggaccaagtcctgtggccatgaagtcgtctcctgcctcgatgtcaggtgtgagacattgctgccttggctagtgaatccggcaccttcctaggcctgggcacagtcactggctctgttgccatctacatagctttctctctccagtgcctctactacgtgagggaggcccatggcattgtggtgacggatgtggcctttctacctgagaagggtcgtggtccagagctccttgggtcccatgaaactgccctgttctctgtggctgtggacagtcgttgccagctgcatctgttgccctcacggcggagtgttcctgtgtggctcctgctcctgctgtgtgtcgggcttattattgtgaccatcctgctgctccagagtgcctttccaggtttcctttagcttccctgcttcctgggaatcaggagcctggacactgccatctctagagcagagtggaggcctggactccctttgctcactccattcgggtccacagctgaggttgcctctgacaagatgaatgggcactgcctgcccttctagtgaaaaggcttggctatggccctgtgtgactccaggtcccaggaaccttgccttcgtcatctgtggatccatccagaacagcggtatctgaagcccaggccatactccctgcctcctttcttctgcctaccagaggctccagagttgagcttgtccttatctagaaacatgtgaagatgcccaagagcctggaggcactgctgtccttcctgcagaaacagtttctcctcctcccctcagccttgtggccagttcctcttcacatgaagcccctggcatttgctggggaagggactggcctggtacttgctgttagggcaggaaggggcaaaaggaagacttgggtagtaatctgggggttcagatgggtagcactaagccagctggcctaaagatgcaataagttcctaggtagtctacccttaccttgaggaatgggaaaatgaacctcagcccattaggcaggaaaagttgatatttaataaacaaggaaagagtgaactgagaccccaaaaaaaaaaaaaaaaaaaaaaaaaaaaaaaaaaaaaaaaaaaaaaaaa

SEQ ID NO: 77 - DNA, 3758 bp, Homo sapiens
acaggagggcgggctaaagaggtcgcggtcgcacgcgcagttggtccttagtactgcggccgtgtgggggcgtgaatactttttctcccgaaggaagattatttcaagtggaatatgccattgaggctatcaagcttggttctacagccattgggatccagacatcagagggtgtgtgcctagctgtggagaagagaattacttccccactgatggagcccagcagcattgagaaaattgtagagattgatgctcacataggttgtgccatgagtgggctaattgctgatgctaagactttaattgataaagccagagtggagacacagaaccactggttcacctacaatgagacaatgacagtggagagtgtgacccaagctgtgtccaatctggctttgcagtttggagaagaagatgcagatccaggtgccatgtctcgtccctttggagtagcattattatttggaggagttgatgagaaaggaccccagctgtttcatatggacccatctgggacctttgtacagtgtgatgctcgagcaattggctctgcttcagagggtgcccagagctccttgcaagaagtttaccacaagtctatgactttgaaagaagccatcaagtcttcactcatcatcctcaaacaagtaatggaggagaagctgaatgcaacaaacattgagctagccacagtgcagcctggccagaatttccacatgttcacaaaggaagaacttgaagaggttatcaaggacatttaaggaatcctgatcctcagaacttctctgggacaatttcagttctaataatgtccttaaattttatttccagctcctgttccttggaaaatctccattgtatgtgcattttttaaatgatgtctgtacataaaggcagttctgaaataaagaaaattttaaaatatttgttaatagactgttctcttctaatagtcttttttttttttttttttttaagagatgaggtctcactatattgcccaggctggtttcaaactcctgggttcaagtgatcttcccgcctctgcctcctgaagtgctaggattataggcgagagccactgtgcccagccattgtaatacagtcttttgtttgaaatgcaaatgttagtgggccaaaaggacagtgttattaatatccctattctatgaagatgtctgttctaaaactgttttagtgatgctctataacagaatcaactatatccattaatcccatggtgttgataaatgaactagtccagctcttcccagtggttaatagatgttaacagcactgtaaatccatttcggccctataatttctggagcaaacgtgtatttttgctgcttttcttataaggagatgctactaattgactatcagaagaacatgttttgaggtcctcctcaaaacattgatgggttggaatcagccatcaacagtgttgtaccagttcttgggtcttgatagacaatttggaaagagatttccttgtttacgaagtgaaggactaagaattaaattaatgaccttggcctcactggcaatcaattacaaatctctatatcagtaagagaattgtaaaattcagaagcagtttacattagactttggaatgaatgatgaactttccccattagagctgccatcatatgattggtggagattgtttaaagaatcattctatctcagcctcaaaaattaccacgggaagatggtatcagtatcactacttaacagatgaagaatctaatgctgtgtgcccatggacacacaaaattaagctgttgggacttgaacagctcaaattttcttgtttcagatcaccagctcttgagtaatagggaaatctggagatttgaaaagtacttgcactgtccacaacatggctaatccatatgtggatgatgcagaattgatttaattcactaacagggaccccataattatttgctgggctctgggtatattgatgtgtaggaagttgtactatatgttaataaattatgactatttggataggctgaattcatactaaatccatactgtagttcaacaaaaaacaacatgtttatatacatttggaaactgcaatgataggaaacatttggaagaaagggattttgccctagaataacacataaggaaagcagagaattagagtatattgttactgaatgttccagagacttctagtgattttaacacttattaagtatagcatgttgatggggagatttgtttctctaaagatcactttgttttattaaatcctaatagaaaatacccttgaaaatcctatctcatttattcctgtaacaaatttattgagcacctacctactatatgccaagaaatgtattagccatcaggcagagagctgttcaaatggtagatatgatctgtgctcctgtgaaacttctagtggggagagccaaacaataaacaatattcctttttaactctaggttaatgcagaaatggataaagcccatgttgcttttgggagaggtgagttgtgtctctgaatcacatgcatttcatagggggaaaaatgcccaaatactaaggagtagctcttagcctatgtccgttcgcctcagcttaagttgttttccctcccactggctgggcagcatatttgtgttttacctggtaaaacagtaaatttcgtaccttctataattggcattcttcaaagaggtagaactttgatttttttgtagaatattaaaacaagctttcttaggttaaagaagtgatcttactacgaacagcaatggtttcatgatgtgtaattgctttatgttatctttctgctatagaatgtttcctggagaaaggtacggtttttagtaataagataaatttactttagtcctgcaaataaggtgaaatcttatgtccagtatctcacaaaggagaactgacagtgccacttttatatttaatgtcaatctcattagacaaaaatgaaatatagttcctagggtttccaatttaaaaagtgaaataataaatatattcactcaaacattttctcagtgccatatgcaagttaccatgtcccagaagctgatacagtttgaagaaggaaatatataagtactgtaagcctgtgataactaaaagcaacatactaaaaagtgaaggtacagataattggaacaaatttaatagcgtttaaaagtgtatttggtaatttctccaggaggtggcactgttgagttgttttttcttttcagacagtaagacaatagaccattcatctttgtgtcacccaaacaaagaaatattcctttataaccccctttcctccccccacctaatcacatgctactggaactgactgtcttgtgatctactcccatagttggcatagatttaaaaataatcttttttaaattaatctgatagtagttatggaaaggaacaaattgttcaccaattttcatcagctttatcttttcagtccagtaactgagaacttaaaaagactattctagtgattttactatcctgctcagatggcattcaaaaacatttttcacttctcacgtcttggaaaaatttgtaaattcgttaagtctttttgtttgaaagttaatgtgactggaaatattttaatgtaaatatcgggttgggtgcattgtatcattttgctctacaatgactatatcctcatttgggtttatggccagtttataattaaaagtaatctttacttgctttgagtgtaaaaaaaaaaaaaa

SEQ ID NO: 78 - DNA, 925 bp, Homo sapiens
ttttttctgctaccgtgactaagatggaagcgtttttggggtcgcggtccggactttgggcggggggtccggccccaggacagttttaccgcattccgtccactcccgattccttcatggatccggcgtctgcactttacagaggtccaatcacgcggacccagaaccccatggtgaccgggacctcagtcctcggcgttaagttcgagggcggagtggtgattgccgcagacatgctgggatcctacggctccttggctcgtttccgcaacatctctcgcattatgcgagtcaacaacagtaccatgctgggtgcctctggcgactacgctgatttccagtatttgaagcaagttctcggccagatggtgattgatgaggagcttctgggagatggacacagctatagtcctagagctattcattcatggctgaccagggccatgtacagccggcgctcgaagatgaaccctttgtggaacaccatggtcatcggaggctatgctgatggagagagcttcctcggttatgtggacatgcttggtgtagcctatgaagccccttcgctggccactggttatggtgcatacttggctcagcctctgctgcgagaagttctggagaagcagccagtgctaagccagaccgaggcccgcgacttagtagaacgctgcatgcgagtgctgtactaccgagatgcccgttcttacaaccggtttcaaatcgccactgtcaccgaaaaaggtgttgaaatagagggaccattgtctacagagaccaactgggatattgcccacatgatcagtggctttgaatgaaatacagatgcattatccagaactgaagttgccctacttttaactttgaacttggctagttcaaagatagactcttcttttgtaaagtaaataaattcttcaaaatg

SEQ ID NO: 79 - DNA, 889 bp, Homo sapiens
gtgacagagcgctttacgacagttgctttgaggcagtaccggaggagaaagatggcggctaccttactagctgctcggggagccgggccagcaccggcttgggggccggaggcgttcactccagactgggaaagccgagaagtttccactgggaccactatcatggccgtgcagtttgacgggggcgtggttctgggggcggactccagaacaaccactgggtcctacatcgccaatcgagtgactgacaagctgacacctattcacgaccgcattttctgctgtcgctcaggctcagctgctgatacccaggcagtagctgatgctgtcacctaccagctcggtttccacagcattgaactgaatgagcctccactggtccacacagcagccagcctctttaaggagatgtgttaccgataccgggaagacctgatggcgggaatcatcatcgcaggctgggaccctcaagaaggagggcaggtgtactcagtgcctatggggggtatgatggtaaggcagtcctttgccattggaggctccgggagctcctacatctatggctatgttgatgctacctaccgggaaggcatgaccaaggaagagtgtctgcaattcactgccaatgctttcttcttttatccacagctctcgctttggccatggagcgggatggctccagtggaggagtgatccgcctggcagccattgcagagtcaggggtagagcggcaagtacttttgggagaccagatacccaaattcgccgttgccactttaccacccgcctgaatcctgggattctagtatgcaataagagatgccctgtactgatgcaaaatttaataaagtttgtcacagagaatctttgtaaaaaaaaaaaaaaaaaa

SEQ ID NO: 80 - DNA, 1618 bp, Homo sapiens
gtggccaggggttggtctttggaatcggagaggcagattcgctgctccgcagcacggccggagctggtcgggtcaagagtcgggatttgtggggagaggttttccactggtcaagagaaggctttaagaaagacggtattaatctcccgttgcggctcccgcctggtcccatcttctgcccgctcctccaggaaatgaatctgctgccgaatattgagagtccagtgactcggcaggagaagatggcgaccgtgtgggatgaggccgagcaagatggaattggggaggaggtgctcaagatgtccacggaggagatcatccagcgcacacggctgctggacagtgagatcaagatcatgaagagtgaagtgttgagagtcacccatgagctccaagccatgaaggacaagataaaagagaacagtgagaaaatcaaagtgaacaagaccctgccgtaccttgtctccaacgtcatcgagctcctggatgttgatcctaatgaccaagaggaggatggtgccaatattgacctggactcccagaggaagggcaagtgtgctgtgatcaaaacctctacacgacagacgtacttccttcctgtgattgggttggtggatgctgaaaagctaaagccaggagacctggtgggtgtgaacaaagactcctatctgatcctggagacgctgcccacagagtatgactcgcgggtgaaggccatggaggtagacgagaggcccacggagcaatacagtgacattgggggtttggacaagcagatccaggagctggtggaggccattgtcttgccaatgaaccacaaggagaagtttgagaacttggggatccaacctccaaaaggggtgctgatgtatgggcccccagggacggggaagaccctcctggcccgggcctgtgccgcacagactaaggccaccttcctaaagctggctggcccccagctggtgcagatgttcattggagatggtgccaagctagtccgggatgcctttgccctggccaaggagaaagcgccctctatcatcttcattgatgagttggatgccatcggcaccaagcgctttgacagtgagaaggctggggaccgggaggtgcagaggacaatgctggagcttctgaaccagctggatggcttccagcccaacacccaagttaaggtaattgcagccacaaacagggtggacatcctggaccccgccctcctccgctcgggccgccttgaccgcaagatagagttcccgatgcccaatgaggaggcccgggccagaatcatgcagatccactcccgaaagatgaatgtcagtcctgacgtgaactacgaggagctggcccgctgcacagatgacttcaatggggcccagtgcaaggctgtgtgtgtggaggcgggcatgatcgcactgcgcaggggtgccacggagctcacccacgaggactacatggaaggcatcctggaggtgcaggccaagaagaaagccaacctacaatactacgcctagggcacacaggccagccccagtctcacggctgaagtgcgcaataaaagatggtttagggtccctgccaaaaaaaaaaaaaaaaaaaaaaaaaaaaaaaaaaaaaa

SEQ ID NO: 81 - DNA, 2644 bp, Homo sapiens
aaaatatctacagaagagctgaaaggaaggtcagcttctcagaagacactgtttctgtcatgtgtattggactttggggtttcattagcatggtctacttttaaccgttttgctgctgacatcatctccgttttggccatgaccatgagtggggagcgtgagtgcctcaagtatcggctagtgggctcccaggaggaattggcatcatggggtcatgagtatgtcaggagaagtggctaaggagtggcaggagctggatgacgcagagaaggtccagcgggagcctctgctcactctggtgaaggaaatcgtcccctataacatggcccacaatgcagagcatgaggcttgcgacctgcttatggaaattgagcaggtggacatgctggagaaggacattgatgaaaatgcatatgcaaaggtctgcctttatctcaccagttgtgtgaattacgtgcctgagcctgagaactcagccctactgcgttgtgccctgggtgtgttccgaaagtttagccgcttccctgaagctctgagattggcattgatgctcaatgacatggagttggtagaagacatcttcacctcctgcaaggatgtggtagtacagaaacagatggcattcatgctaggccggcatggggtgttcctggagctgagtgaagatgtcgaggagtatgaggacctgacagagatcatgtccaatgtacagctcaacagcaacttcttggccttagctcgggagctggacatcatggagcccaaggtgcctgatgacatctacaaaacccacctagagaacaacaggtttgggggcagtggctctcaggtggactctgcccgcatgaacctggcctcctcttttgtgaatggctttgtgaatgcagcttttggccaagacaagctgctaacagatgatggcaacaaatggctttacaagaacaaggaccacggaatgttgagtgcagctgcatctcttgggatgattctgctgtgggatgtggatggtggcctcacccagattgacaagtacctgtactcctctgaggactacattaagtcaggagctcttcttgcctgtggcatagtgaactctggggtccggaatgagtgtgaccctgctctggcactgctctcagactatgttctccacaacagcaacaccatgagacttggttccatctttgggctaggcttggcttatgctggctcaaatcgtgaagatgtcctaacactgctgctgcctgtgatgggagattcaaagtccagcatggaggtggcaggtgtcacagctttagcctgtggaatgatagcagtagggtcctgcaatggagatgtaacttccactatccttcagaccatcatggagaagtcagagactgagctcaaggatacttatgctcgttggcttcctcttggactgggtctcaaccacctggggaagggtgaggccatcgaggcaatcctggctgcactggaggttgtgtcagagccattccgcagttttgccaacacactggtggatgtgtgtgcatatgcaggctctgggaatgtgctgaaggtgcagcagctgctccacatttgtagcgaacactttgactccaaagagaaggaggaagacaaagacaagaaggaaaagaaagacaaggacaagaaggaagcccctgctgacatgggagcacatcagggagtggctgttctggggattgcccttattgctatgggggaggagattggtgcagagatggcattacgaacctttggccacttgctgagatatggggagcctacactccggagggctgtacctttagcactggccctcatctctgtttcaaatccacgactcaacatcctggataccctaagcaaattctctcatgatgctgatccagaagtttcctataactccatttttgccatgggcatggtgggcagtggtaccaataatgcccgtctggctgcaatgctgcgccagttagctcaatatcatgccaaggacccaaacaacctcttcatggtgcgcttggcacagggcctgacacatttagggaagggcacccttaccctctgcccctaccacagcgaccggcagcttatgagccaggtggccgtggctggactgctcactgtgcttgtctctttcctggatgttcgaaacattattctaggcaaatcacactatgtattgtatgggctggtggctgccatgcagccccgaatgctggttacgtttgatgaggagctgcggccattgccagtgtctgtccgtgtgggccaggcagtggatgtggtgggccaggctggcaagccgaagactatcacagggttccagacgcatacaaccccagtgttgttggcccacggggaacgggcagaattggccactgaggagtttcttcctgttacccccattctggaaggttttgttatccttcggaagaaccccaattatgatctctaagtgaccaccaggggctctgaactgcagctgatgttatcagcaggccatgcatcctgctgccaagggtggacacggctgcagacttctgggggaattgtcgcctcctgctcttttgttactgagtgagataaggttgttcaataaagacttttatccccaaggtcaaaaaaaaaaaaaaaa

SEQ ID NO: 82 - DNA, 1362 bp, Homo sapiens
attggtgaagagcgacgggccaattggaggagttgttgttaggccgtcccggagacccggtcgggagggaggaaggtggcaagatggtgttggaaagcactatggtgtgtgtggacaacagtgagtatatgcggaatggagacttcttacccaccaggctgcaggcccagcaggatgctgtcaacatagtttgtcattcaaagacccgcagcaaccctgagaacaacgtgggccttatcacactggctaatgactgtgaagtgctgaccacactcaccccagacactggccgtatcctgtccaagctacatactgtccaacccaagggcaagatcaccttctgcacgggcatccgcgtggcccatctggctctgaagcaccgacaaggcaagaatcacaagatgcgcatcattgcctttgtgggaagcccagtggaggacaatgagaaggatctggtgaaactggctaaacgcctcaagaaggagaaagtaaatgttgacattatcaattttggggaagaggaggtgaacacagaaaagctgacagcctttgtaaacacgttgaatggcaaagatggaaccggttctcatctggtgacagtgcctcctgggcccagtttggctgatgctctcatcagttctccgattttggctggtgaaggtggtgccatgctgggtcttggtgccagtgactttgaatttggagtagatcccagtgctgatcctgagctggccttggcccttcgtgtatctatggaagagcagcggcagcggcaggaggaggaggcccggcgggcagctgcagcttctgctgctgaggccgggattgctacgactgggactgaaggtgaaagagactcagacgatgccctgctgaagatgaccatcagccagcaagagtttggccgcactgggcttcctgacctaagcagtatgactgaggaagagcagattgcttatgccatgcagatgtccctgcagggagcagagtttggccaggcggaatcagcagacattgatgccagctcagctatggacacatctgagccagccaaggaggaggatgattacgacgtgatgcaggaccccgagttccttcagagtgtcctagagaacctcccaggtgtggatcccaacaatgaagccattcgaaatgctatgggctccctggcctcccaggccaccaaggacggcaagaaggacaagaaggaggaagacaagaagtgagactggagggaaagggtagctgagtctgcttaggggactgcatgggaagcacggaatatagggttagatgtgtgttatctgtaaccattacagcctaaataaagcttggcaactttttttccttttttgcttcaaa

SEQ ID NO: 83 - DNA, 1556 bp, Homo sapiens
ccaacttccggtcaccatcttgagtgacgacagaggcggagctccaactgacatgttcattaagggcagggctccgagggcgccacctcgagagcgacggcgggctacccggggcgggctgaggcaggttgtagccccgccccgggccttgggctccacctctcggccccacttccgccgggcaagcgtttgtaggcggcgctgccgtaaatcaggcggtctgcttgccgcatcacgcaagatggcggccgcggcggtgaacggggcggcaggcttctcgagctccgggcccgcggcaacctcgggcgctgttctgcaggccgcgaccggcatgtacgagcaactcaagggcgagtggaaccgtaaaagccccaatcttagcaagtgcggggaagagctgggtcgactcaagctagttcttctggagctcaacttcttgccaaccacagggaccaagctgaccaaacagcagctaattctggcccgtgacatactggagatcggggcccaatggagcatcctacgcaaggacatcccctccttcgagcgctacatggcccagctcaaatgctactactttgattacaaggagcagctccccgagtcagcctatatgcaccagctcttgggcctcaacctcctcttcctgctgtcccagaaccgggtggctgagttccacacggagttggagcggctgcctgccaaggacatacagaccaatgtctacatcaagcacccagtgtccctggagcaatacctgatggagggcagctacaacaaagtgttcctggccaagggtaacatccccgccgagagctacaccttcttcattgacatcctgctcgacactatcagggatgagatcgctgggtgcatcgagaaggcctacgagaaaatccttttcactgaggccacccggatcctcttcttcaacacacccaaaaagatgacagactacgccaagaagcgagggtgggtcctgggccccaacaactactacagttttgccagccagcagcagaagccggaagacaccaccattccctccacagaactggccaaacaggtcatcgagtatgcccggcagctggagatgatcgtctgagccccccgggcactgggtggggcagggcacgagttatttaaaacagttacactgcagggtttcgcccaataaaggtggactgacattccctcttccaggcccttgtctccccagttgggacggcagagagacaagttcttatatctgaagaacttggaggttttggggcattcaggagttggagatagcctccaactgggtcagcctctgtctggtgggcattgctcagggtctcaaacatggacgcccactgtggggccccagcagcactgtggcctgcaggagggcatggccccaggtagggggactgttctagccagctgtggacacataggaatgctggaccagggtaccagattttttcaacaaagggggtgaagtgtcctactaaaaagaataaatgttggcagtgaattaaacaatttttcaaatgaaaaaaaaaaaaaaaaaa

SEQ ID NO: 84 - DNA, 1734 bp, Homo sapiens
aagtgccgcctcacagtcctgccagagacaggagacgccgggccgcccgcgccgtctgtcccaagagctcctcctggacatccgcttgactctccgtcgtctccaattggccgtcggggaacggaagccgaagcaaactagtgaacccggaagtgcttcgcggcggaggcccgggcaactcttttgaatggaatcgggctgattcatcgccggtttgcagacagagccgcgtcgggtgtgcgccgctgctgctgttgcctctgtcttcgcgtcaccacagaggcaagacaagggtccatatcgcggcatccggctcccgcccgtcttcaggagagaaagaaaaaataaaatatacttggggaagttgtacctgccagaattagcaagagctttctttaagaagacatttgtcaaactcaacaaattgaaggttaacaccttaagagttgtagttactgaccagaaatatggacagacttcttagacttggaggaggtatgcctggactgggccaggggccacctacagatgctcctgcagtggacacagcagaacaagtctatatctcttccctggcactgttaaaaatgttaaaacatggccgtgctggagttccaatggaagttatgggtttgatgcttggagaatttgttgatgattataccgtcagagtgattgatgtgtttgctatgccacagtcaggaacaggtgtcagtgtggaggcagttgatccagtgttccaagctaaaatgttggatatgttgaagcagacaggaaggccggagatggttgttggttggtatcacagtcaccctggctttggttgttggctttctggtgtggatatcaacactcagcagagctttgaagccttgtcggagagagctgtggcagtggttgtggatcccattcagagtgtaaaaggaaaggttgttattgatgccttcagattgatcaatgctaatatgatggtcttaggacatgaaccaagacaaacaacttcgaatctgggtcacttaaacaagccatctatccaggcattaattcatggactaaacagacattattactccattactattaactatcggaaaaatgaactggaacagaagatgttgctaaatttgcataagaagagttggatggaaggtttgacacttcaggactacagtgaacattgtaaacacaatgaatcagtggtaaaagagatgttggaattagccaagaattacaataaggctgtagaagaagaagataagatgacacctgaacagctggcaataaagaatgttggcaagcaggaccccaaacgtcatttggaggaacatgtggatgtacttatgacctcaaatattgtccagtgtttagcagctatgttggatactgtcgtatttaaataaagcaacgaaaaacgctattaatgatgccttcagtgtatattcctctgttgttcctaatgctcaaaatcaagggacctctgaaggtgtacttggctaaatgtaagacatctggcatcatttgcagcactgtaacaccttcagtctcagttgtgcaattacttctgtttctttagtcagggtctttgcagattctaaagttatacatgaatacatcaaagtggacaaattttgttaagatcccatttaatatttgaaaaaatcagtagcacaaatatattttgattgtcacttacaaaataaaatacatttacagtctaaaaaaaaaaaaaaaaaa

SEQ ID NO: 85 - DNA, 6992 bp, Homo sapiens
actacttccggcttccccgccccgccccgtccccgggcgtctccattttggtctcaggtgtggactcggcaagaaccagcgcaagagggaagcagagttatagctaccccggccgcggagccggctcactgcactacccccgcccccttctttcctccagacgccgaagtcgcgggcgctcatggcgggcctggaggtactgttcgcatcggcagcgccggccatcacctgcaggcaggacgcgctcgtctgcttcttgcattgggaagtggtgacacacggttacttcggcttgggtgtcggtgaccagccgggtcccaatgataagaagtcagaactgctgccagctgggtggaacaacaataaagacctgtatgtcctccggtatgagtataaggatgggtccagaaagctccttgtgaaagccatcaccgtggagagcagcatgatcctcaatgtgctggaatatggctcacagcaagtggcagacttgaccctgaacttggatgattatatcgatgcagaacacctgggtgacttccacaggacctacaagaacagtgaggagcttcggtctcgtattgtgtctggaatcatcacacctatccatgagcagtgggaaaaggctaatgtaagcagtccccaccgggagttcccccctgctaccgccagagaggtggacccactccggattcctccacaccacccacacaccagtcggcagcctccctggtgtgatcccctgggcccgtttgttgtcgggggagaagacttagacccttttgggcctcggagaggtggcatgattgtggatcccctgagatctggcttcccaagagcacttattgacccttcctcaggcctcccgaaccgacttcctccaggcgctgtgcccccaggagctcgctttgacccctttggacccattgggaccagcccacccgggtacgtagtcactcagcccgaggcctgacagacgcgggcagtgatgagccctgttctggagtggaaagagcacgatagagcaccaggctaagaggcacgagatcaaggcggtagtcacttccgctctgcagctagcatttcaaccatatgtggatcctttcatttctcagctccctggattccttcccctaaattaggacctattatttacctgtaggtaagcaagctactgtagctcttctgaggtatctgccaggctgttttctgtagcctcagattgcctatctgcttagcctgagaacaggtagatgaaaactaaactgatgcctaggcccagggtcagtctcagatggaagctgggcctgggtggggaggctagcatgcgtggctccctgggtatttctgtcagtccccatggcaagcagtgatttagtaaaacaccccagagtcagggaagccaaccaccttgaaacctttagaacatctctgctttggagaaagacccagagatcaggcagaggtgcagattcaatcattactcataacctttgagagatggcaaatgggaggagtgttagtctttgttttggaattggaccattcttgcaaccaaaaggacttagagcagtttgctcataaagacatcctttattataaaaggaagtatttaaaggatgatagagaccatcagatagaagcagggaaggtagataacttttaggaccttgatgtgaggaaaagataaaatttaaacaataaatttgccacttagattttctagcagcaaagtccgaaaagatagttatatacaaaattctgttttctgaaaacaaaattgtgattcaccttcagaattggccattttttttgtgagtttccttgcatcaaggacactgagaaacacagtcattgtcttaggtgttctatgggaggaagtgaatagagcctttaggaacttcctggtcaagcttatggtgcttattttgatctgggccacttccctccttccagtcatgagtaatcatcaaggagcaagttggagtgtttcaggtgtatattttgtagaacccaaaagattggagccttaacaataaacatcagcactaagtgacctgttcctccttttttaaatagcagctttattgagatataatttacatacccataatttacatacctgtttaaagtatacaattcagtggatttagtatgttcacagtgttgcacatccaccaccatttctaattcctgaacattttcaccacctcaaaaagaaaccacacacccattggcatgactccccattcccttgctcccagccccaggcaaccactaacatctgtctctaaagattttttttttttttctggacagttctcataagtggaatcactcagtattatggccttttgtgtctggcttctttcatttcatgtgatgttttcaagattcattcatgctgtagcatgtatccatggtatggatatatcacattttgcttatccttttatcagttgatggacagttgggttgtttctacaaaaaggctattatgagtaatgcagccaagaacatttgtgtaccagtttttgagttttcagttgtttgagtttcagatgttttcagttcatttgggtatataccaaggagtggaattgctggttcacatggtagctctatattctactttgtgaggaattgtcagactgttttccacggaagctgcaccattttacatttccactggtaatttatgagggttccagtttccccacatcttcaccaactcttgttatttttcatgcttatggccatcctagttagcgtgaagtagcatctcattgtggtcttctcttccattttttaaaaaagaattttgacctacaccaagcaaggcagagaccagagtcagtcccccttggggagcaatctgtggttttgataatcaccaccttgggatgaacatggctggtgagctgcagagcagttgatttgacttttggggatggttctaggctggatgtgatacagggcaggttttgtctctagagaaagttctcatgaccttcaggtctaatgagattcagatcatcactttggtttggtttgaaatttctttgtttatccagtgaattacaagtagaataaagatctggttctaaattgtcttttggtggtgaagtgccatagaccatttcggaccatttctatgatgtaccagcagcccccacatcacacctcctcttccttggcttgtctcttccccaattcttagagttagcagtgtttcttactgcattcatctcctcagtcataagtgtctgtcaacctccgttgtgaagtcatgagtctcttgagactgaaactccaagaatgtattgtgctcacagtggcgatggtgttcctgtgctggatggtcagtggttgttgacatgtagttagaaaataggtagcaagttccacgcagcctcactctttggaacctagtttctcctatggcctccctttctactgttgttaataacattctattaatgatccatgcctctcttcacaggaggaatattagaatctatggagcagttagtattctttgtcacctaaatttgtctacttctgtacatttccaataaggcaccaccagggcaagggaagattccccacatgtatatccccagctgtttctgtcataaaacttgcatgtgtataaaccactattgactttttgcaccaaaggagatattcaaggacagacatccaagtccccagccctttattgcccttgggataccacaaggcacagatacaggcagctgctgtgtggctctggagttcctaatccccagattgtagcaatgatgatgtgatcctgctgctctctggaccgtaacctttttggttacaaaaggtaaatttctgtttactgcatctgaaccccaggactaatgcgtcactgcattaaccccaggacacatggaccaagtcactgcggccgtacttggccctgaatctgtcctggagggtgggtcaaaaggcaagggtggcaggtaggatggtaggcagtgaggggtggcaaggcctagctgactgaggacagacccagcaacaatgacaggaggtttgaacacctcacgagtggtagtgcccatgggaggtgcgaagtggaaggcccagcccttgcttggaggaacgtgaggctgatggtgcagtgcaatagaggtcactggatgcccatttgaacagctgcgttccagatgagccacctaaggtggatgttgtgagagtcacagtgggtttagagggacaaggtagtgagaggatgctgctgacgcattagtcctgggattcagctgcagtaaacagaaatttaccttttgtaaccaaaaaggtaatggtccagagagcagcaggatcacatcatcattgctacaatctggggattaggaactccagagccacacagcagctgcctatatctgcaccaaaaagtagatgtccttcacactgccatctggacaccactcagctagctcatccaagttcaaggctcaattgaatgcgtctggttgttggaacctacatggcctctcaaatggtactggcatggaatattggggagatgtctttattccctcttcccacctttcctggaaggtgcactgggacagaggtctagtgagccaatcttctgtgttgtctacgccatggaccatgatataaatgggtaccacagccttgcatgcctgagcctaaccatctcctgagatgcttgctctaagtacacattagtacatgctgggccccaatctagatctcaagggaacggccttcagatccatttttgacaagttccttttgtgagtcctatgatcatgcaagtttgagaactgagaagggaggggaagacctacctccttgttactcagaccaccagcaacagcagcatcacctgggaacctgttacacatgcagaatctcaagccccaccccagacattgaatgagaatctgcattttaacaagttctccatgagatttgtgtaaacttaaagtgagagaagctcacatggactatgtctttttcctttacgtgaatatcgagtacaaagaattgagccagtcagtcctcttggttaatggcacattatgattaatgcatgcatgaactctgattcgaagttttcgttgattttacccccagtatccactccattcctttgcccccatgggtcacttagatgtgtttcatgttatctttaaaaatgcagcacctttatagcatacattatatcttcaaaccataaccataatgaggtgttatccccatttcctgtaccagaaaaggaaggattgggaaggtccagtaatttgctcagggtcaagcaggagtctcagactcagtcaagcgtggttactcacagccctccctttctcagtgtgtggccttcctcatccacaaaatgagcatcacccctacctgcaggattcttgcaagatccaaccaaataatgtgtcttattaacagagagttggggctcggtgggtgcttgctgcaattgttactaaagtcatatgggtagataagggtgggactcaaggacaagagaggaaccttggaatatcccccagtgcaggaaacaagcatttatcaggtgcacacagcgtgctaggcttctcctcatcgcatgtagtacccctgacaaccccaaggtaaacacagctagtggcattagttgagatgctgcacctaccccctggggtggcagaaccgtgattggaacccaggtcagtgctcttttcagtagaactgctgtacccagacctcacatcctctctaggtgaggtgcatgggtccctgggcaaaacccattccagaagctgggaaaccacgtcaggacttgtgtgagaaaggagtgatgcttcataatccccaggatggtcttaaggctcctcagtcagtcctatttgcacagcgtgcctcatgctcctgagtacctccacctgcagccacagtgcccagagcacctggttaggaggagcatctgaaaccacctgcacaacctccattccacagaggaagaaacaggctcaagaaacccatatgtgatggggagctcctaacaggcttccctgggccacaggaatgggctcgggctctctgctgggctctgtcacctggctccatgtgctgctcacctcggccttctgagtttagtaggatggcagctagtcttccctattgacaggtgaaaaagcaggtccacagctgttgagtgactttcccaaggccacacagaccacaaatcctggctccaagtccagggcgtttccagtaagcactgtccaaatcagtcatggaggtccctgagtgacaaaaatatgcaggaccccttctttccccctcccagttcccgcagctaggctgagtgttaagaggaaggtgccatacaggttcagcaccctggtcagcgcccagcctccctaaagccgctggaggaggcctttggagccagctcaggtcagtgtctgctgcttccttacccaggatggcccactcttggggacagacaggcatcctgagaggagggggcctggacctaggtgtcttgccacccaatacagagccctgccctctccctctccttcagaaggaagtatgggagcagttccatcctcaaggtttcttggttcccaggacagaaatttgagtgagaagcatgtgaagagagggatggcccaggggcccttggccatggtggccttggacaagtttggctttccccatctgtaaaatgtagataaggatggacccacctccccaagatcctgcctatctgtgagagtccatgactaagtgggccatgggctggactgagttcagtgctcccccaacctgccctcctcctctcccccacagagcttcccaatttacatgtaaaccttgggcatcaaagtgacagctgatagcccaggtttgcccacaaatgtgctctgactggcgtgcatgttattaaatttgataagatgcatgatggcaaaaaaaaaaaa

SEQ ID NO: 86 - DNA, 906 bp, Homo sapiens
gtgcgctgctgcgcaggcgcggtggtcggacgacagaccgtgtgtttccaaaatggcggcagcgatggatgtggataccccgagcggcaccaacagcggcgcgggcaagaagcgctttgaagtgaaaaagtggaatgcagtagccctctgggcctgggatattgtggttgataactgtgccatctgcaggaaccacattatggatctttgcatagaatgtcaagctaaccaggcgtccgctacttcagaagagtgtactgtcgcatggggagtctgtaaccatgcttttcacttccactgcatctctcgctggctcaaaacacgacaggtgtgtccattggacaacagagagtgggaattccaaaagtatgggcactaggaaaagacttcttccatcaagcttaattgttttgttattcatttaatgactttccctgctgttacctaattacaaattggatggaactgtgtttttttctgctttgttttttcagtttgctgtttctgtagccatattgtattctgtgtcaaataaagtccagttggattctggaacggatgctctctcttgtgtatgtgaacaaagtgaacataaatgaagagtctccccttccaaggctgaaaactcagcttttgaaagtgaaatgtttgttcatcggggccagagcagggttgtcctctgagcgcatcacttagtgacgaggaatccaacagctcaaggcagagtgtggatcaccggctcccgaaaacagcagtcagcccttctttctcctgtgtgacagcagtgggcagctgaaagagggaagaatgtgggattcagtcatcaaacccagttctgagtcctggttccacagcttgggtactgatggcaatcttggccaagttgtctctctactctgaactttc

SEQ ID NO: 87 - DNA, 1201 bp, Homo sapiens
ccagatttggctttatatagcggacccgtaaggccgaccggcctctaccggcgggatttgatggcgtgatgtctcacagaaagttctccgctcccagacatgggtccctcggcttcctgcctcggaagcgcagcagcaggcatcgtgggaaggtgaagagcttccctaaggatgacccgtccaagccggtccacctcacagccttcctgggatacaaggctggcatgactcacatcgtgcgggaagtcgacaggccgggatccaaggtgaacaagaaggaggtggtggaggctgtgaccattgtagagacaccacccatggtggttgtgggcattgtgggctacgtggaaacccctcgaggcctccggaccttcaagactgtctttgctgagcacatcagtgatgaatgcaagaggcgtttctataagaattggcataaatctaagaagaaggcccacctgatggagatccaggtgaacggaggcactgtggccgagaagctggactgggcccgcgagaggcttgagcagcaggtacctgtgaaccaagtgtttgggcaggatgagatgatcgacgtcatcggggtgaccaagggcaaaggctacaaaggggtcaccagtcgttggcacaccaagaagctgccccgcaagacccaccgaggcctgcgcaaggtggcctgtattggggcatggcatcctgctcgtgtagccttctctgtggcacgcgctgggcagaaaggctaccatcaccgcactgagatcaacaagaagatttataagattggccagggctaccttatcaaggacggcaagctgatcaagaacaatgcctccactgactatgacctatctgacaagagcatcaaccctctgggtggctttgtccactatggtgaagtgaccaatgactttgtcatgctgaaaggctgtgtggtgggaaccaagaagcgggtgctcaccctccgcaagtccttgctggtgcagacgaagcggcgggctctggagaagattgaccttaagttcattgacaccacctccaagtttggccatggccgcttccagaccatggaggagaagaaagcattcatgggaccactgaagaaagaccgaattgcaaaggaagaaggagcttaatgccaggaacagattttgcagttggtggggtctcaataaaagttattttccactgacaaaaaaaaaaa

SEQ ID NO: 88 - DNA, 866 bp, Homo sapiens
tcctctttttccggctggaaccatggagggtgtagaagagaagaagaaggaggttcctgctgtgccagaaacccttaagaaaaagcgaaggaatttcgcagagctgaagatcaagcgcctgagaaagaagtttgcccaaaagatgcttcgaaaggcaaggaggaagcttatctatgaaaaagcaaagcactatcacaaggaatataggcagatgtacagaactgaaattcgaatggcgaggatggcaagaaaagctggcaacttctatgtacctgcagaacccaaattggcgtttgtcatcagaatcagaggtatcaatggagtgagcccaaaggttcgaaaggtgttgcagcttcttcgccttcgtcaaatcttcaatggaacctttgtgaagctcaacaaggcttcgattaacatgctgaggattgtagagccatatattgcatgggggtaccccaatctgaagtcagtaaatgaactaatctacaagcgtggttatggcaaaatcaataagaagcgaattgctttgacagataacgctttgattgctcgatctcttggtaaatacggcatcatctgcatggaggatttgattcatgagatctatactgttggaaaacgcttcaaagaggcaaataacttcctgtggcccttcaaattgtcttctccacgaggtggaatgaagaaaaagaccacccattttgtagaaggtggagatgctggcaacagggaggaccagatcaacaggcttattagaagaatgaactaaggtgtctaccatgattatttttctaagctggttggttaataaacagtacctgctctcaaattgaaataaaaaaaaaaaaaaaaaaaaaaaaaaaaaa

SEQ ID NO: 89 - DNA, 1017 bp, Homo sapiens
ctcttcctgctctccatcatggcgcaggatcaaggtgaaaaggagaaccccatgcgggaacttcgcatccgcaaactctgtctcaacatctgtgttggggagagtggagacagactgacgcgagcagccaaggtgttggagcagctcacagggcagacccctgtgttttccaaagctagatacactgtcagatcctttggcatccggagaaatgaaaagattgctgtccactgcacagttcgaggggccaaggcagaagaaatcttggagaagggtctaaaggtgcgggagtatgagttaagaaaaaacaacttctcagatactggaaactttggttttgggatccaggaacacatcgatctgggtatcaaatatgacccaagcattggtatctacggcctggacttctatgtggtgctgggtaggccaggtttcagcatcgcagacaagaagcgcaggacaggctgcattggggccaaacacagaatcagcaaagaggaggccatgcgctggttccagcagaagtatgatgggatcatccttcctggcaaataaattcccgtttctatccaaaagagcaataaaaagttttcagtgaaatgtgcaattctgttgtgtgttctgtgaaaggatcctggccatattcaagtccttggacctcaagccacttaaagcttcgatgggagtagctggtaacaaccccgtcatcctctgattggatgccagtatttcctggcagatccaagtccaagcttcatagcattcattgcctgtgcttgccacaccttggttgatgtgctgtggtgcagtagccccatttggaggggagggtttggttgatgttggggtttgaatttagagccttggttaagcagggtgcagtgctcctgtgttccaggaggccccctgctattcagtgattctgttctgtactagaaattttatcagcattgatgcgtcatgaaggaatgacaggctttggtgtgatggttgagattaaatttagacttaactgtt

SEQ ID NO: 90 - DNA, 579 bp, Homo sapiens
tctttcttttcgccatcttttgtctttccgtggagctgtcgccatgaaggtcgagctgtgcagttttagcgggtacaagatctaccccggacacgggaggcgctacgccaggaccgacgggaaggttttccagtttcttaatgcgaaatgcgagtcggctttcctttccaagaggaatcctcggcagataaactggactgtcctctacagaaggaagcacaaaaagggacagtcggaagaaattcaaaagaaaagaacccgccgagcagtcaaattccagagggccattactggtgcatctcttgctgatataatggccaagaggaatcagaaacctgaagttagaaaggctcaacgagaacaagctatcagggctgctaaggaagcaaaaaaggctaagcaagcatctaaaaagactgcaatggctgctgctaaggcacctacaaaggcagcacctaagcaaaagattgtgaagcctgtgaaagtttcagctccccgagttggtggaaaacgctaaactggcagattagatttttaaataaagattggattataactctagaaaaaaaaaaaaaaaaa

SEQ ID NO: 91 - DNA, 801 bp, Homo sapiens
tggcgacccggaagttgtacttgcaactgcggctttccttctcccacaatccttcgcgctcttcctttccaacttggacgctgcagaatggctcccgcaaagaagggtggcgagaagaaaaagggccgttctgccatcaacgaagtggtaacccgagaatacaccatcaacattcacaagcgcatccatggagtgggcttcaagaagcgtgcacctcgggcactcaaagagattcggaaatttgccatgaaggagatgggaactccagatgtgcgcattgacaccaggctcaacaaagctgtctgggccaaaggaataaggaatgtgccataccgaatccgtgtgcggctgtccagaaaacgtaatgaggatgaagattcaccaaataagctatatactttggttacctatgtacctgttaccactttcaaaagtaagttctccatcccataaagccatttaaattcattagaaaaatgtccttacctcttaaaatgtgaattcatctgttaagctaggggtgacacacgtcattgtaccctttttaaattgttggtgtgggaagatgctaaagaatgcaaaactgatccatatctgggatgtaaaaaggttgtggaaaatagaatgcccagacccgtctacaaaaggtttttagagttgaaatatgaaatgtgatgtgggtatggaaattgactgttacttcctttacagatctacagacagtcaatgtggatgagaactaatcgctgatcgtcagatcaaataaagttataaaattgccttcaaaaaaaaaaaaaaaaa

SEQ ID NO: 92 - DNA, 1586 bp, Homo sapiens
gcgccccgcaggaagtgcttccctgggcggaagcttctgagcgtgatatagcggaagtgccttctcttccggtctttctggtctcggccgcagaagcgagatgacgaagggaacgtcatcgtttggaaagcgtcgcaataagacgcacacgttgtgccgccgctgtggctctaaggcctaccaccttcagaagtcgacctgtggcaaatgtggctaccctgccaagcgcaagagaaagtataactggagtgccaaggctaaaagacgaaataccaccggaactggtcgaatgaggcacctaaaaattgtataccgcagattcaggcatggattccgtgaaggaacaacacctaaacccaagagggcagctgttgcagcatccagttcatcttaagaatgtcaacgattagtcatgcaataaatgttctggttttaaaaaatacatatctggttttggtaaggtatttttaatcaattaggcttgtagtatcagtgaaatactgtaggtttagggactgggctagcttcatatcagatttacttgttaagtgactgttttggaatgtttacttttggactgggtttgtaacacggttaaaggcaatgagaaacaagcagaattccaggagtccttgaagcagagggcactggaagacaatatagcagattaaaatagcacagctcatgtggcataggtgggtattttagatgtttgagtaaatttgaaagagtatgatgtttaaattacctttagcaacatgttcatctgctatgctgtcatgactagggggatgattattagtcacatagagcttgggagtaccactggaaacgtatgggtaggagtttaggtggcttctgtttttcaaaagatgatcttatcctagtatctgtaatgctcacttggcacacctgacttgtgggctgtgtgtaaggtggctagctaagtgaaaaaagcctgctaggtgtgagtcaacttaagaatatgtaaataggtttgagaaaaagtagggcttgggtgcaagtaaagattgagcaggaaataaaggaaaatcaagtataatccctgagatttgtagactaaaggcaatgatgtgggactacttggtcgaatttttttagccctcaacttggtaattgggtgtttctgtgttaaagcactgaaacttgctgtcgtgccttcctagttttcgtggtttattgacagggttgggggttttttttgtttttttaaaatgaagggacaaagtcaactggactgctgagtgagagggcaggggcagttgaagggaacatgaattgctggaacagctacataaaatagtgatgtagccaagtcatgctatttaaattataattctccactgtgtttagaataacatctgaggttcttaacctggccttggaagggtatcacttttacttgtaacctggaatggctttataatgtgctagctaattgctactctcatcttgtattttaactcctaatttacccttcaggtctcagcttcagaacattcacttataaagaaaccctgctgattaaatctctcttgggcttcctcccaaaaaaaaaaaaaaaa

SEQ ID NO: 93 - DNA, 439 bp, Homo sapiens
gccttctaagctcgttcttccgccagcttccctcctcttcctttctccgccatcgtggtgtgttcttgactccgctgctcgccatgtcttctcacaagactttcaggattaagcgattcctggccaagaaacaaaagcaaaatcgtcccattccccagtggattcggatgaaaactggaaataaaatcaggtacaactccaaaaggagacattggagaagaaccaagctgggtctataaggaattgcacatgagatggcacacatatttatgctgtctgaaggtcacgatcatgttaccatatcaagctgaaaatgtcaccactatctggagatttcgacgtgttttcctctctgaatctgttatgaacacgttggttggctggattcagtaataaatatgtaaggcctttctttttaaaaaaaaaaaaaaaaaaaaaa

SEQ ID NO: 94 - DNA, 11689 bp, Homo sapiens
caagtatttttcagtaaagcttgtgttttggtttgtttgttttgttttttgatcctctcacctcagcctccagagtagctgggactgctggtgtgggccaccatgcctggctaattttgtttatttttatttgtagacatggggtcttgctatgttgcccaggctggtttcaaactcctgggctcaagcgatctgcccacctcagcctcccaaagttctgagattactggcatgagccaccgcacctggctggtaaagctgttttaaaaataagtttaaggctagatgtagtggcataggcctgtaattccaacactactaccatgaactgctcatacacgtctatcctccttagtaatctgggacaggatgctggggacgtgtgtctcagttctctcttcaaagactcatctcccattcccacacttacagaactagaaccatgtactctgtgatttcatttattatatgctaaagcggtttttacaaaacaacagaggaaagatcattcaatatattatagtaagaatgtcggttagctaacatttggggggaaatataatttttttctatttattctatttatctttatcaaccccaagttaataaaaaattaaatatatgttattaaatagaattgagtatctaatagatctttgaactgatagcagctttctaagctttgaaggaacaagaagagattacaagagaaaagatcaacagatttggctatataaaatcctgaaagtttgtacactgaaaagtacaaccaaaaagaaaataaccaattggtatgacaaaggattaatgtctatattttataaagcattcatggaaatctacccaaaaaacatgtccccaaagataaatggccagagatacttcacacaagaggaaatggaatgagtaaacaagcatgtggcaaaatattcaacctcactagtggctttttttttttttgagatggagtttcactctgtcacccaggttggagtgcagtggcacgatctcagctcactgcaacctctgcctccagggttcaagcgattctcctgcctcagcctcccgagtagctgggattacaggtgcatgccaccacgccttgctaattttttgtatttttagtagagatggggtttcaccatgttggccaggctggtctcgaacttttgacctcaagtgatccgcctgccttggcctcccaaagtgctgggattacagtcatgagccactgcacccggcctagttgagattttttagtgtaaattaaaataattacattagcaaaagttaaaaataggtgattaccaggctggcacgagtatagtaaaattgcaagaatcctccgagaaaggctttttggcaatacacatatgctactacaaaaggattcagactctttgacacagtgctctctttctaagggttactgccaaccactcccctgaattaatcacagatgcaccacttctcccacatctgagtctccagcccagatcatgcgcctgagctcaggactgggtctataagatatctccaggctgatgttcccccgcaccctcagccctgtgtctcagactcatctcctcatcttctcctcaagcacactcctctgcctcctccttgttccggtgaatgcatcactgagtcaccaagccagaaacctgggagtcatcctaattacctcgttgtccctcacccctgcacattcatcatttcccagtcagatcctgccaatactccatctgcaatgtcttttgagtctttgagccccctcctcctcagccccagagtcacaaatctaggtctcagcagccttcagtttcttgcttgtattgttgacagagacctgacccatgtcctccaagccactcacatttccttcaaaccattctacgtggaggagtttgagttatctttttaaagcacaacactgattctgtcctccttaaaatctttcaacagctctccattgtctacccacaggctaaagtccaagatcctaaagatttagctgccctctgtattacaacccgcttcaccaccatttttttctccgataagcttctcctagctttccctccccacccccgcagcctgcttctcatattattatttgttccttgagagcaagaactagatcttaataatctctgcatcctcagttcataatgcagagcttgacacagagtaagcactcaataagtgttggttgaaggaatagatttattctaaggaaaatattcaactgaaggaaaaagctgttcactgtagcaacacgcataatagagaaaaagtacagaaaactaaatgtccaacaacagagaacttgtattaattgtgggacatccacttaatggaatatgatacagctgttaaagtagtaattatgaggattatgcagcaacttggaaagtgtttctaatataataaaaacagaatacaaaatggtctgtatgctaggactaaaattatgtaaaagtatgcatgcacacaagccgatcagaaagagaacaggaagaggaacaaatgaatacagatgatgtgtttagggtgtttggggaggtactgtttgcgatttacttagctctttccaaatttcctttattgttgttagaatgtcatttgtgcataaatacaaattgagagagagaaatatactgaaaaagatgctttgatttcctcaagtcctttgataacctatggcataaaaacaaaccactcacctgggaggcaagagacaagtcccctcatccccaaacgggctgtgtgatcttgattaagtgagatctgcagctctaaccagccatttctcctatcctctctagctggaaagcacatggttatccccccactcccacagcaacttctccaccatttctgttaattgtaccaccatcttcccagtgctctcagattaaaaacctcagaaccaacttccattatctcatcaccttcaccttctctctactcctcacctccaattaatcgatcctttccaataatcacttataacatgctttattgtggattgtatcccagttttagacaaggaggagttcctgccctcttagttaatactgtctgcttggttaatactgtctgcttgagaagagccaacaatgtttccctctcttgctcctctgcagactgctgaggggtaaagtggatggtacagatagagacttgtgaaatggaacctcatgagttaggagcttgatctcatggtgggaagaattcaggcacaggctggatgctctcagggatagtacagtaggacttggcacaataagtgggatgctgactccgtttattcattcaacaagtatttatcaagtgctggacacagtgccgagctctctgttcagtggcaaggggcctgcccagatgaattagggcaggctccatcctggaggtgctcagtttggtggaggccaggtaactaaatttgtccttgctacctaatgtgctgtgtgccctcaccaagtttgaacacaagcctctggggcaagaatgagggatttaccctgactgaggggaccacgagcccacagaaccagagggacttgaactgtgcatttccaaggctgaggtgtgggattaggtggtacccaggaagggggtttggctgtttgtggcagttccaagctaaggaatcgagtccacaagcagtcttgaaagagctgactctagccaggcgcagtggctcaggcctgtaatcccagcactttgggaggtcgaggcgggcggatcgcttgagtccaggagtttgagaccagcctaggtaacatggcgaaaccccgtctctacaaaaaaataaaactacaaaaaattagttgggtgcagtggcgtgcgcctgttgtcccagctactcgtgggggctgaagtgagaggatcgcttgagcccgggctgtctgtcgaggctgcagtgagccatgcactacagcctgggtgacagagtgagaccctgtctcccaaacaaacaaacaaaaagagctgactccctcggaacaaactagcttggtggggcttgagctttgaagtttgggattggggagagagagcaatggagccagataaagttcagacctgctcccttacggcaggaaacagagggccaagggcagtttcgaagcaggatcagatctacattttagttagatataaccagacgatttctaatatcctctctcctccctgagtctctataagtgccaaatgcgttgtacaggaagcaagggggaggatgtcagagttcaagcagagaagcaagagggggttaaaaacgttgttggctcttcccaactcagtatgggctgcctggctggctcaagggaacacaaaaaagggacagacaaaatacgtttaagaaataacattaaatatttattaaaatgtattctattgattatatacaagttctttgttttgttttgttttgttttgtttttgagacggagtctcgctctgtcgcccaggctggagtgcagtggcgcgatctcggctcactgcaagctccacctccggggttcacgccattctcctgcctcagcttcccgagtagctgggactacaggcgcccgccactatgcccggctaatttttttgtatttttttttagtatagacggggtttcactgtgttagccaggatggtctcgatctcctgacctcatgatccgcccgcctcggcctcccaaagtgctgggattacaggcgtagaatcatctgtacgtgagactggaagtaagctcactttgaactctccttgaggccagggatgttgtgtagctcatctttgtattcccagcacctagcacagaataaggcacacaagaggcgctcagcaaatatgggaggaggaagggcggaaaaaggggagggaggaaatcgcccttaggagacaccctctttccgcggcggttcctcaactcgggacttctgacctcccaccagcagatggcaagaaagagtcccggcgcgccagcaaagggctgagctgggcggagcagctgaaaatccggcgcgcgcagtctccagccccaatttctacgcgcaccggaagacggaggtcctctttccttgcctaacgcagccatggtaagccgtttagttagcgagctcttaggacgtatccgcctccatcctcccccggccggggctgcccgaggtttcgggattcctactggggatggccgggcagaggcgaagggatcacggcctccgtggtaggccgggacgggctccagggcgaagggcgaacgctggcctagggttggggaggcgcagatctggtgctgctgttgggaaggcctcggtttctgacccggccatacgtcctgatcccgggagaagctgcttttcctcccgggccggagccgcggctgggccaggagctcagactgcgagcccgaggttggtgggcgctgggggtgcccggcggagaaaggttttctttgtcattgcctttttggcacggcctgactttaccatacgtggccggtaagcatctggacacagcattaaaaaggcttccttactctttttaaagtaaaattggtgtcagcttttggctttagtgtacgaaggagcagcacatgtgtttgtgcggatgtcagaatcttgttccatacgtgtcaaaaacagacggtaataaattgtgaaaactttagaaacacaggtagactcctggctcatttctgttgctgtgcgtttcactagtatggtgttcttgaaagaccctaacctctaagcagatacagtttcaaacagtaacatggaaacactttagcaaggttctgaaagatagtaatcagtaaacgttctgaaacatagtaaccaagaatattctctgttacaataagaaggcttgttgcagcttatggatctcacggtgtttgttaaataactgtgtttgtttctgttttatcggaacactatactttaatattgtccacattttgctgaagatgaaactaaactaagagtttagtttcacactaggttttataagctgttctgaaacctgattaacagcattgcaatctaaaactttcaggctcgtggtcccaagaagcatctgaagcgggtggcagctccaaagcattggatgctggataaattgaccggtgtgtttgtaagtatcttatataaatatttccgtggccactgtttttaagtgtctcccaggactcatttggggaccaggctaggggaggaatatctattcttggcttcctctgcccttgaaggagctatactatctagctgtcctccacttccaatcgatttaatatttttgtgcctcatttattccacataccacatagtacatttacatggactcaggattcatgttcttaatgatcctggtcctctgacagggaagatgctataaaactttaaggtatgaaatagttttggatgctttttacacctcctgtgtaaaagtccaagttgggtgtaatatggacggtcttggtgttcagttagtggatctggtggactaggaggtaggtttgagtgctttagtgaatcccaacagtgattatcatttttaacgttacaggctcctcgtccatccaccggtccccacaagttgagagagtgtctccccctcatcattttcctgaggaacagacttaagtatgccctgacaggagatgaagtaaagaagatttgcatgcagcggttcattaaaatcgatggcaaggtccgaactgatataacctaccctgctggattcatgggtaagaagttttaaatactctggagacgcatattgatggcagccctatggtatccaaatactgtcttgatcatttttctaacctttgtaatctgtcaagtctcagaaacaaagcctgaccttccctctgttttttacttaaataaaaaacatgcaaataatcatgaaacgcttttcaaaactaaatttcgattcacttttaaattttacatgcagtcatggggttttgaaatattgaagatctggccgtgatctttaatcttcagaatccttgttggattagaactgggaggcacatgggggttctttttgtttcgtagagagctatggttgttgctcggcatgaggtagtggggatcactgtatgtagtaaccggttactgcttgatttcagatgtcatcagcattgacaagacgggagagaatttccgtctgatctatgacaccaagggtcgctttgctgtacatcgtattacacctgaggaggccaaggtgagtgtggcaagcaagctgggtctttactcagtatagttactttgttctaagggcctgcattgagtacgagtgctgcttgcaatgaggtgggtattgattagttaaaatctcatacctggaaatatctagctaacaattcgatgagattctgtcttacatgtaactttttgtcatgttattaaaagtctggctgatagctgtagggcattgatggatacctaaaattggcccccatttgaagttaacttcctcagcagattttctttttttgtggtagaaatgaattccagttgaaccgcgacttcctggtgtctcttaagagtcaaggagaatgatttctgggaacttgtttattgggtacctgacgtaggagccctttgccatgtctccatttgtgggagtagctttactttggggaggggaaggtgtcgatggaggaaacagacagtccttgaggcactagtttgaggtttaaaaaaagattacagtctttgattatttaatccagtttgttttgatggttttacacaaaagtttagggctgtttggattattggctgtaaatgaaggttaatttaattgactgatgtggctcctaatttccttttgcacagccttgttaacagcagactggagggcacgtccagtgggatctgtgattatttgatttacttcaaggatatcagggagtagagatccaaaattgaaatgctatgtgaagtatttgttgattggatgaactggtaatgtaattgctgtttgtgagacaaaactcagtcgtgatgtacagggagccattaagataaagttgagttgaagggaagaattcccagggccccataaggcttaaagagcctgggaaactggagtggcatttacattggaggagtggagggcaatggtggatgttaggaggacgagcctagagaagggctttatgcaacatacacttgagggtggaaagaacgatcagcgtcacaattaatctgcagcagttagggaacccatggttcctgtatagggttaaaaagtacatgtgagatggattgaatgtggctaacccttgtatttttctagtacaagttgtgcaaagtgagaaagatctttgtgggcacaaaaggaatccctcatctggtgactcatgatgcccgcaccatccgctaccccgatcccctcatcaaggtgaatgataccattcagattgatttggagactggcaagattactgatttcatcaagttcgacactggtaagcatcctctgtgctacctgggcaccctctttaaggcctagatcattatgaattgcacagggtctgggtatctttattaaaaaccatctgctccaatcgcccaggtgtgtttatagccagaggcacaaatgctcagaatactcatttcttttctttaaattgtttgttttttatagaggagggtcttactgtgttgcccagactgttctcgaactgattataggtgtgagccaccaagcctggccacaaaatttcttacgagagtcccgggagtcctagcataggcagcagttccatatgaggaaattcaaatggggggaaaggaggaataaaatttgtttggacccatctctgagctgcttgtcatttgttatattgagttgaagcagattatttcttcctgcctaggtaacctgtgtatggtgactggaggtgctaacctaggaagaattggtgtgatcaccaacagagagaggcaccctggatcttttgacgtggttcacgtgaaagatgccaatggcaacagctttgccactcgactttccaacatttttgttattggcaaggtaagtctgggttttccttctctctagtctgaggaaatatgtaaatgcaggtggctgctgggattgtagcatccaggctcctggctggctctgctgaacctagtgcaaagcctcttctggataggactcacgcagagctgggctgagtcataatgattagccttaggtactactaaactttgactcacttgaataaatggtaggtgcctgctatgcacaataaacttctaagacattaattctgaagggcatacggtgagtttcataggacagccccagaaacccaagcagtgggtgcttttggtaaccagcatctgtgtcttgcaactgcctagctgatgccaagcactctcacaaacaggcttcagttctgttaagtgaggtgacaaatgtagcatgtgccaagccactatgagttggtgtgtggtgggttttgattctgcttgttttctcttccagggcaacaaaccatggatttctcttccccgaggaaagggtatccgcctcaccattgctgaagagagagacaaaagactggcggccaaacagagcagtgggtgaaatgggtccctgggtgacatgtcagatctttgtacgtaattaaaaatattgtggcaggattaatagcattttggttttgtgggttgtttttttttttaattcagtttcctgctattttactgtataacatgaacagtgattaagttctcaggcaggcttaggcagtctgttattggctgggcttagttagtggtgggaagtagaagataccagacttgggaaaggaacagcaactaaccaaggagtagaaagagccaagaaatcccggagtatttatctcccccgccttgacttggccaagaacttctctacacagtggacccctctgccctgttaagttcccttggctttctaaaaatctgccctcattttcttctccagtctgtattgcactagcccatccacaagcctggctcatctgtttttcccactcctgtgcccatcttgccaaacgcaggatgaaaatctccagttgccattaaaggtggtcataaatgggctgttgatgttgcaaagcattgcagttccttggacttagtgcccttattctccagctgccgctgcagtcctcaactctgtttttcagaggacagagatgtagaacataaacttgttcttgcttgtccaaatgtgtcgggtcatgtcaggcttgcttaccagtctcaggaagatgtgcccctgcttcatggggcctgctgttacacacctgttcctcaatccagtccctccagtctcagtgtcaattatcctaccttgtgatttcaaccttctctcaaccaactctcttgttcctgttaccctataaagcatgtcttcctgttaaaaacgaaaacctcccttgccacctatagcagggcttttcaactttgatactgttaacatttggggctacataatttgtgggcagctgtcctgtttattgtggaatgtttaacaacattcctagcctctatccactagatattcaccccccaccccctgagttgtaatacaaaaattacttcagacactgctaaatgccctctgagaagcaaagttgccctgtgttgagaggtactgccttgtagatgctgtatctcaggtcaccttcatttagcaccttgcacttaacttgctgtagaccactcaggcttaatcatcccaccatcacaggtttaggggagaaaatcagttgcgttttggacatctttaagataaacatgtgaagtcacttggcatatttagctgggaatgttaaatggtccctgtttcccaggtgtatggtttagcagtggataagaggcctgtagaggcactgtggcttagggcagtatctctacccctggcagcatcctggactttgagtcagcagactacttggtcttgccagagaaaatcagctaaaggaggcatgcccaggggtccctgaagcccagatttggtcccatagggcttctctgccattcatattgcagacgccaaagcatgactggctggggtcccattcactttttttttttttttttttttttttttttttttaaagacagcgtcttgctctgtcacccaggctggagtgcaatggttcagtcatagctcattgcagcttcaaactcctgggctcaagcgatcctccagccgcagcctcctgagtaactgggactatgggcacgcactgtgatgccaaattaatttaattaatttgtttctgtagagaaggtcttgctacattgcccacgccagtcttgaattcctgggctcaagtggtcctcccaccttggcctcccaaagtgctgggattacacgtgtgagccactgtacctgggccagaaaaggaatttctgcagggactgggcccccctgaatcagggatgggaaaggtgtgtaagtgggcttgccaggtatcttgctttaagaatggttctcttgtcaagagaatggagctcatccttgttctgttgaggccaggtcagaagtaaccttatggtgcccttcagaaacaggcaggtgagccgggcgtggtgactcacacctataatcccagcactgagagaggccaaagcaggtggatcgactgagcccaggagtt

SEQ ID NO: 95 - DNA, 646 bp, Homo sapiens
tctccttacgtcacttcctctccagcccctgcgtaatcgataaggaaacccggacgctgctgcccctttctttttttcaggcggccgggaagatggcggacattcagactgagcgtgcctaccaaaagcagccgaccatctttcaaaacaagaagagggtcctgctgggagaaactggcaaggagaagctcccgcggtactacaagaacatcggtctgggcttcaagacacccaaggaggctattgagggcacctacattgacaagaaatgccccttcactggtaatgtgtccattcgagggcggatcctctctggcgtggtgaccaagatgaagatgcagaggaccattgtcatccgccgagactatctgcactacatccgcaagtacaaccgcttcgagaagcgccacaagaacatgtctgtacacctgtccccctgcttcagggacgtccagatcggtgacatcgtcacagtgggcgagtgccggcctctgagcaagacagtgcgcttcaacgtgctcaaggtcaccaaggctgccggcaccaagaagcagttccagaagttctgaggctggacatcggcccgctccccacaatgaaataaagttattttctcattcccaggccagacttgggatcttccgcg

SEQ ID NO: 96 - DNA, 689 bp, Homo sapiens
aggcatcggcgcggtcagcctcgtggcgcgcccacgcccccacgccggctcttcccggggtccttccgtgcgcgttgatatgattggccggcgaatcgtggttctcttttcctccttggctgtctgaagatagatcgccatcatgaacgacaccgtaactatccgcactagaaagttcatgaccaaccgactacttcagaggaaacaaatggtcattgatgtccttcaccccgggaaggcgacagtgcctaagacagaaattcgggaaaaactagccaaaatgtacaagaccacaccggatgtcatctttgtatttggattcagaactcattttggtggtggcaagacaactggctttggcatgatttatgattccctggattatgcaaagaaaaatgaacccaaacatagacttgcaagacatggcctgtatgagaagaaaaagacctcaagaaagcaacgaaaggaacgcaagaacagaatgaagaaagtcagggggactgcaaaggccaatgttggtgctggcaaaaagaaatgaagtgtctagcagtgagctggagattggatcacagccgaaggagtaaaggtgctgcaatgatgttagctgtggccactgtggatttttcgcaagaacattaataaactaaaaacttcatgtgtctggttgtttgaaaaaaaaaaaaaaaaaa

SEQ ID NO: 97 - DNA, 114836 bp, Homo sapiens
taaatctacaatagctatgagccaaccccctgcttttgcctgtttcaggggcctggtacccttcctaacttctgaccctcagcctctttctttctaggtcctatggtggtctccttttccattcatgactcttcccctttggctagcagacgtttaaacatttcccttaggtctctcctctgcttttgctgaggttctcaggcctctaggaaggcagaaggaggattcaggattggcagagagagcacctccatatctacctttttgtctgtagagcaggaggagtggcatctggaattgattcatggtcttagcaaccaccagctccttaaagggtctcaagttcctagactagcctgtgtgtgtgcatgtccagtgtgcggtggcatgtctccataactcagccttgcaaagaagcctcttgcgaccggcccgtacataggcctttcagcttggcaggcctcatcatcttcattcccacaataatttctacatttccaagtgctttgccagcatatttgatcctccaaacagtcttgtaagataaattgaattggtattatcttcattaggccaaagttaaggactagcaagtttagatgacttgacttgtccaagatcacacaggagtccagacctcttctgaaccactgctctttaaaggccaacatcctgtctttctatgcctccctacattctccgtcagcagagttctgaaagagaccccacccttcctgccgcaccacagactttggtttgaactctgcaatacctatctatgacctcctttgaatcctatgagatggttagaagaggcagcatcctggccttttggggtgggtgaaggattatttgcaaggctgttctaaccttctcatctccagcctgggtcaggtccactgactgcatgtgccctgttccttggggcctggcccagactggataatatcctaaggtgtgacaggagtaagtggggaaggaaggcatggaaaatggtgactcggagcaggctgtaggttctgtgttagcttgagtcccaggaaatacagccagctatgagaaggcagagattttattgaggatgccgcctgtggaatttaagcctatggctgcaccagttcagagccagagcattcaccactggtggggcccaggtattggaaaaccatttgccagacagatgatggtatgatgacatttgtttttgtttcttatctgtttcttccctccctatcacttttccctttcttgtctttctctcttggcccttctttctacctgcttatccttttgcttttcttcctctacaattctactctccttttcctgtctcttttccaatctatcctcattccctcctcctgcctcctctcttatcctatacttatggctgctcaacttctgtctattcctctttcctctctccttcccacctgcctgttcatcctatttctctctcctgccgctctatccccattttcctaccctgtccttgtcttctcgtgttgtccctctctcctcttcgcctttcccctatcacctcatccaatatatgtccctttcttcctctctgccccatgtcttgcagggatttgacccattccgattcggagtcctccctccacatgagtgaccgccagcgtgtggcccccaaacctcctcagatgagccgtgctgcagacgaggctctcaatgccatgacttccaatggcagccaccggctgatcgagggggtccacccagggtctctggtggagaaactgcctgacagccctgccctggccaagaaggcattactggcgctgaaccatgggctggacaaggcccacagcctgatggagctgagcccctcagccccacctggtggctctccacatttggattcttcccgttctcacagccccagctccccagacccagacacaccatctccagttggggacagccgagccctgcaagccagccgaaacacacgcattccccacctggctggcaagaaggctgtggctgaggaggataatggctctattggcgaggaaacagactccagcccaggccggaagaagtttcccctcaaaatctttaagaagcctcttaagaagtaggcaggatggggtggcagtaaagggacagcttgtccttccctgggtgttctgtctctccttccctcccttccttcaagataactggccccaagagtggggcatgggaagggctggtccaggggtctgggcactgtacatacctgccccctcatccttgggtccttcattattatttattaactgaccaccatggcctgcctgccctgcctccgtcccaaccatgggctgctgctgtcactccctctccacttcagtgcatgtcttagttgctgttccctcagctcccagctccacctctggggttcagcttctgtctctgctgtcccagttttgaggtttggtttcttgtttctgtctcttgctttcgggctcctccctcccaccactccccaacttcccctagcagttgcagggaagataggacgagtagcttctgacatgtgtgcctcagatctgttccaccccactcacagtggttctgtttgctccagactggggctagggcctaatctttgaagtttgttctttggtattgatgtgggtcagaaggagcctcatcctaatctcactcaggcctccagggatccatgggggagtgaaaccaattctcagagaacaacccaccagagacttttaaagagaggccaggcttgggaatgggttgggagaggcatctgttcattggagcatgagtggatgccagaactgtaggttataaggcagtcactttttctctctactcccacccacacctgcctccctcttacccctgctcccccacactgcaggaggatttgtctctaagaggtgctgccccaaagctccccaagcatcaatactcctagggctcaggacaagtggctcccctggccaggagagccacagccatgatacagggctcttatggagccctggagttgttgggcaaggatgctgtcattttttgaaccaaaagacaaacaggttaaaaggaaaaaaagtaatctgaatttcccaagtgcctacgctgcatattccccttgttagatcccattttcatgttactttgtagccttggccagaggctcaaaaaggacacaaccagtttggggaaggggtggctaaggaagatggtataggtgaaggcggctgtgtgaccactttcccccacccttcccaccctctagacaactctctcccttacctgtttttgctatggctgtaaaggtatttttcctctgccccactccctgccatacctttatcctgggatcctattttgggcctggggtgggtatacctggggctggtcttaggagggtgctaggctgcagactgccttgtactccctggacaccctcaaatggggttttctgtgttatttcataaaattctttgaagtccaataaagcatgtaggagattttaaccactgctggctttgactctcattgtgttctctgtgctgtggcatgatgggataaagagacaatctttcctttgcccagggaaaatgaaacttgaatgcacatgcccagaagctctgtgggcagggttaccagataaatgcaggatgaccagttaaatgtgaatttcagataaacagtttttaaagtataattttctctcatgcagtatctgggacacatttttatttgctaaattgggaaaccctatgtctgggtaaacttgaccctatctatcctataacttcacttacgacttttaaaaaacatatctatttaatttttctttctttttttttgttttttttgagacggcgtctcactctcttgcctaggctagggtgcaatggcgcgatcttggctcactgcaacctctgcctccagcgttcaagcgattcttctgcctcagcctcctgagtagctgggattacaggcgcgtgctaccatgcctggctactttttgtatttttagcagcgggggggtttcaccacgttggttaggctggtctcgaactcctgacctcgtgatctgcccgccttggcctcccatagtgctgggattacaggagtgaagcaccgcgctggcctactttttctattttttgtagaaatggggtctcactatgttgcccaggcttatctcaacacctggcctcacatgatgctcccgccttagcctcccaaaatgctgcaattacaggctcacttacgactttccatgatttttgaaattacttcacagggagcctgggcagcttctggagggcagtgagaaaccaacgaaaaggctttagggaaaagatgccacagatgaaatttcataaagatcgctttgggtagcccaaatcagaagcttctacaccagccttacatattacggttctcatctattcttattctccactctaagtcaccaagtccatcctacctccacaaggcaaataccctgtctctgccaccatccactgaagaaccctaaaagcaaatgggtactgaccctgccctgcttaaaattctctcagggctctgatttgcgtcaggataaaatccaaacgccatcggccttgcgcggttttcttccagttccagagtgtcagtcctctggccgatctaaaagccctggggctccaagctgcccacggctgtggagcctgggctggagcccacagcggacggcagtgttagtattattataataaatgtcagagcaagaaaaacgttcccgccggttaggttttgttatttcaaaaataaattaaccgcctttcctccggcggagacgcgcaggtgagagggcggcgcctgacccagcgggctctaggtgctacgccagggccccgagggtcccgaactcggcttgcccacacaaaacatggtagcaggagagcagcatttccgccgggcatgtccatatccaatggggcccatgggagaggcgtagtcttctgggtcttgcccagactcaacatggcggctacacgtcgcctgtcagtctgtgaagcctaccccgggcgtgggccgcagcgtcgagtaacgtcattcgaaccccgtcgcgcccctttgtgcgtcacgggtggcgggcgcgggaaggggatttggattgttgcgcctctgctctgaagaaagtgctgtctggctccaactccagttctttcccctgagcagcgcctggaacctaacccttcccactctgtcaccttctcgatcccgccggcgctttagagccgcagtccagtcttggatccttcagagcctcagccactagctgcgatgcatgtgatcaagcgaggtgagggggggacgaggtgggcgagaaggaaggtgaggggatgcgggctgccgccgccggagctgatgcccagaccgcccgcccgccttcgctgcttcccgcctttcccgcatttcccgccgcggccttccgccctgtcagcccgctcggccttctgtcttcagtcagcctgccccgaacctccttcgggccttcaggctgcgccccctcggctttgtcatcctgccgcctttcaaaaggataacacttaccccgtatcgagtagtgactgcgtacgccgagcacttgccaggcactattttattcctccctgcaagcctctgagagatgattagcttattacagatgaggaaactgacgctcagagcgaggtgtcgccgactgacccaaagtcacccataggtgacaatacggtttgatttgaaaaccgtggggttggtgagctgtcttaggcacagggtcggggggcagctaggaaagaaggagggggcctctctaccctccgtaggcacttgtcagtttactgatctcttttgtggggtgaggataggagtgtggcgtggaaaaaacagatcccagacagacagcaccctcgagttcctttcccttcatgggaagagatgctgaatcagagaagggtggctgagacatcttctgacaagatggggactgggaagagtcaggaactcgtattctttctcaacagttctttttcattagacttgccaagtgcccgctttgtgcccagccctttgcttggctttgtgagattgtaggaggagacagtccctgccttgggaacaggcttcatcgggttggaaaaacaagagcaacatacttttaacaaccgcatgagatacgtatgaacaagttttgagttgaacctacttgcctttgttaaagcaatacaatgatttcaaaattgtaggcacttagtaaatactggttaatcgactggttgtttctattttgtcctctaggctgtgaacatttcaaagatggagacttgtttgagacagagtcttgctctgtcacccaggatggaatgcagtggtgtaatcatagcttactgtaaccttgaagtcctgggctcaagcgatgctcttgcctcagcctctcaagtagctgggactataggcatgcaccaccatgagtggctaatttttaaaaatttctggtagtaaaggagtcttgctgtgtttcccagtctggccttgaattcctggcctcaaaccatcctcccttccttggcttcccaaagtgctgggaatacaagcaagatggagacttttctgttcacgtttagcacaggacctgacatgaacagattcttaaagaatgaatgaaaatagttgtatcaaaatgtaggacacgatgaatgctgtgaataagcaggtagttgatttggtttaactacagccaatgtccagattggtttaactacagacaagagttggaaaggtggacagtagtggcctttcttgtttttggtatcttgagaacatcattctgtgaattttcctagctcacattttagctgaccaaagagcaaaataacatagtgcacttttattgatccattcataagagtgagagctgagcatctatttttgtatttttatttttttacattattatttatttgtatttttttagagaaggagtctcgctatgttgcccaggcttgtcttgaactcctgggctcaagcattcttcccacttcagcctcccaaagtgcttggattacagtgctgggagccaccgcacctggcttgagcatctattttttaaatctttagatatgggagagatgtttaggatggtctatgataagtcagtaacaaagatgaattgaaaatgtatggacttagatgaccagaatgggtaaaattcaaccctgtgttgaattttgaacttttagagtctacttctaaatactttcgtttaaaaagtgctaccttggcctggcgtggcagggcatggtggctcacgcctgtaatcccagcactttgggaggctgaggtgggtggatcatttgaggtgtggagtttgagaccagctgggccaacatggtggaaccccgtctctactaaaaacacaaaagttagccggacggtagtggtttgcacctgtaatcccagctactcaggaggctgaggcaggagaatcgcttgagcctgggaggcagaggttgctgaaatcgtgccattgcactccagtctaggcgacagagtgacactctgtctcaaaaaaaaaaaaaaaaaaaaaaaccacaaagtgctagctataactagctctaaaaagcagagcttattttctcattccttcatagagcacaatttgatccagatggttcatgctgtagattctgccattgtagcattcagcaagacttaatatacaacatgtacttagatttgtttgtttctttttttttttatatttctatgtttctatattttaatgttttttaatatgcatagggtttttggttttctggactttttttgtacccccttatttttggcatgtcagtggaatagcagactaactcctacagtttttgttaattttctttgagatggggtcttgctctgtcatccaggctggagtgcagtggtgtgatctcagctcactgcagtgtctgcctcctgggttcaagagattctcctgcctcagcctcctcagtagctgggactacagatgtgtgccaccacgcctggctagtttttgttatttttaataacaagggcaactggaagttgactttgaagtacctactgaatatgctaatgtcttgctaaacactgtgagggcagtaatggagaaggcagctctatcttcaaagaacttaaaattgttagggatttaggaacaatccatatgaaaattattagatagaagagaatagtagatgagtttttttcatctgctatcttgagctatttttcctaatgggagagtatcattcctcaaggagattatggttaaaaaaataaacattgagaaccattgcagtaaatgacaaagtagctaactgagttgtaaactgttttggaatttagtgtagtattttcaaaactttggattgtaactcacagtaaaaaacaaaacattttacagacatgtgtatatatgtggatacacataaaatgatacaaaagtttacgaaataatgtctttgaaagcatccatttgcactctaatctttcttttattccagattctttccctatccctgcctccctccctcccttccttcctccctttcttcctccctcccttccttccctccctccttgcttccttccttcctttctccctcccttctttcctgccctcctccctccctcccctccctctccccctccctccgtcccttcctccttccttccttccttccttcctattccattcacagcctgctaatattattttacaactctgtggataccgtgctgttcaccgggattgcagtgatgagtaggcagacatggttccagcttccaaagatcctacaatcaattgagaaagatagacaaataaagaagtaatatgataaaatatgataaatactctgataggtaaagtataggcagtagaggccattcattcagttattcataaagcatttattcagcacctctttgtgctaggaaccgttgtaggcattagagattctgcagtgaacaaagctaaattacatttctcattgagttgacttcttggtgtgggtgggagtggtaagtgtatataagaaataagaagtaaacataataatcagttaatttcagatactgattaatgagatgatagtaaaacaggatcatgtgataaagatgaatgagaaaataaccttggattgggtagccaggaaaggcttctctgagaagccaacatttgagctgaaccctaaatagtattaagagctagtaatgtgagatctgtggcctgaacattctcggcagagggaattagaaagtttgtatcctgtggaaaaggcacgcatccttggtcttacaggattagggaagtcttcctgaagagagaagaatgaaagacagtttatagccaagaggaaatcacactagtatgctagaggattttttaattttattttttattttttgagacggagtcttgctctgttgcccaggctggagtgcagtggtgtgatcttggcttactgcaacctctgcttcccaggttcaggcaattctgcctcagcctcccgagtagctgggattacagcatacccagctaatttttttttttttttttttgtatttttagtagagatggggtttcaccatattggctagactggtctcgaactcctgacctcaggtgatccgcctgctttggcctcccaaagtgctaggaatacaggctgagccaccatgccctgctggctagaggattttaaaagaggaaaaggtcagtgtgagttaaaagtggttgaggcaggttttatggaggtgtgagatttggagggtgagtaggagttagatgtatggaaaggtggaagaggaacctttaggcagagtaaggtataagcaatgatgtggatatgggaatgggaagccctcttgggacttatatttcacagggaacagttgaagagatctggggccaaactaagaaaggctttgcttgagagaagaggataatgtaggcagtgagaagcagggattagtgatgtgataaaatcaacatctggcttgaaaaactaaccaagtggaatgacagaatagagaactgtgtgtcattggacctttagatctttagtctgcctcctattttcaagtgtgagttaagataattaccaatgcacttttttttttttgtcagtttcctgattgacttcagaacttctggcagttgtagaattttctttttgctaagttgctttccccccccactgcatgtataattgcagaacgctaatgttgctttgcagttacctgcctgcttagttatccaattgctagagcactgaggtttcagtcccagtgccagccagttaatttaccccatttcagagttaaatgctgcagatgtgagcctgatgagaaaattatcacaatggtgatcagaaagagaggggctaacatatcagtgtagaagaaaaagcaacttgttctagtgataatgggttaatagtgatgtcttattgttcatttattcttcatcaaatgtttgagaacttgccttgttctaggcactaaatttgagaatacagatgtgaatcagagggccaaataaatgtaaacatatttagcatgtttcttattggttacttcaggttgagtatcccttattcaaaatgcttgggcccagaagtgtttcggattttggatttgtttcagattttggaatattcgcattatacttactggttgggcatccctaatcagaaaatccaaaatctgaaatggtccaaggaacattttctttgaacattgtgttggcattgaaaaagttttggattttggagtgttttggattttggaattttggattaaggatactcagcctatagttacaatggattgtaggtgcacaaaagagacaaaaactaaatcagtgtgagacactaacatttattgagtgcctattgtgtatcacatactgtgatttttttttcccccataggagcagctttattttataacgaggtatagttgtaactatgccaaagttgttacaacaaaagcactttttaccttatctaattttattgtcacagtaaactgattaggcaagtaaaatagatataataattaacccctttctacaaatgaagatctgtgaaatgactgattgtgttttgtggcttgtctaaggttaaggctgtttggtggttggatatattcactattcctggtaagaataaataaaggtcggatgagctactatttgaggttaaactaagagtagtaagacttttttgtctagaaggacaaagatataatctaagtccaaaatcatgaaaaatattaggtaaaatatatagtatgtcagatggggtaagtgcaatggagaaaaagcacagaaggggaagggggataagaagagcaagggtcctatttggggcattgcaatttaaaatggaatcatcagggaaagccacattgagaaggtgatgacattgagcaaaagacctaaaggagatatatagcaagaaggccaagttgtcaaggtacaataggaaggaaggtgggagagttggaggtgaaattgggaagtgggtgcacaggacaagtggtataggattctgtggatttttttttttttttagttggagtttcattcttgttgtccaggctggaatgcaatggcgtgatctcagctcactgcaacctccgcctcctgggttcaaacaattctcctgccttagcctcccgaatagctgggattataggcccctgccaccatgcccagctaattttttgtatttttagtagagacggggtttcaccatattgatcaggctgatctcgaactcctgacctccagtgatccacacccccccccgctcccttggcctcccaaagtgctgggattacaggtgtgagccactaggcctggcctgtggattgttataacaattttgacttttattctggagatcataagccactattaggagttttgaaggaggtaatgatatgattctgagtttaacttttaaagggtaattttggctgccatgtgggatgggggaaaaatttaggaaattatccgtaaacgtctgtctgtatagaattcatactctttgaaggtgacatcagagaagacaatctcttcatgaatcttttgagggggcctcaatcttttctgtgaaatagcacttcatgttggtcaatttacatgttaattacatttgattctttgacattgtagtcttaataattgctaacatgaatttaataattgctaacatgatttgattctttagatggccgccaagaacgagtcatgtttgacaaaattacatctcgaatccagaagctttgttatggactcaatatggattttgttgatcctgtaagtaaatatggtttttatcttgggttccttctttcatgtgtttctttccatttgtctcttatccctggaccttcattcacctgatatactttggtattctggctatgcccttcgatataaaatttgaattcattgcttaaaacatttttttttccttaattttggttctgtcctgtgagttctcacttttcagagaactatgaatgtgagtaaagaggaaaatttgatattaacatttaatatcagatatttccttgagtaaattgttttattcattagtggaaaagcctaggccaggcgccgtggctcacgcctgtaatcccagcactttgggaggctgaggtgggcagatcacctgaggtcaggagttcaagaccagcctggccaacatggtgaaaccccgtctctactaaaaatgcaaaaattagccgggcctggtggtgggcgcctgtaatcccagctacttgggaggcaggagaatcacttgaacctgggaggcagaggttgcagtgagccgagatcgtgccactgcactccagcctgggcgacagagcgagactccctctcaaaaaaaaaaaaaaaagggaagcctagagtaaagcttgttttggaattgtggttatttaggtagggactggtttaaaatttgttttttgttatttatgtaaaaagatttaagtaatataaagtagatttcatggacaatatttaagtcaagaacaaactattcataaaccagttgctctgcttttctccttatcctttataacttctgtattctagactctcatcatcagttatctggactgttttctgtggtctctgcagtgtcctggacttcctctaatcttaccctcttcaaactcgtcttccacctgacttctaaaatgatcttccttaaatgagaatctctaagaactctttttttcaaatccacccatatttccgtctccttatttaggtatcttatccgcactgctaaggtatcttaggtatcttatccgtaaaacctgtgctcatctcatagctttaatcatatagtatggaaattaattatggatctttgtcctcccctagaattgaggatgggctgtgtatcttattcttgtgatatcctcagtgcttgacatgtatctaattagccacttgaccaaagtaagtttggtcaagagaaaatgattttatgtatcttgaaaatatgtttattgtaaattctcttttatattgaggacttaggcaataattagaatagtagaatgttagagttggaatgaacttaagagtccatcccatttcatctttggtttatagataagaaagttccaaagagagaggggagtgacttaagttagtgggagtgtagggagaagcacctaggtctcttgactcctacatgttctattgcctcatgcagtagtacattttagagcgcaagaatgttgcagcatcctcaaacttcctagggtagattctgttgaaaaactgtcggtgcacatctgtaatcccagcactttgggagactgaggtaggcagattgcttgggctcaggagtttgagaccagcctgggcaacatggtgaaactgcccaggtgcagtggctcaatcttggcccactgcagcctccacccctggggatcaaatgattcttgtgcctcagcctccctcagctgggattacaggcatgtgccaccacgctatttttttttttttttttttgtatttttagtagagacagggttttgctatgttggccaggctcgtcttgaactcctgacctcaagttatctgtccgccttggcctcccaaagtgctgggattacaggtgtgagccacactgtgcctgccctcaaccctgtttctacaaaaaaaaaaaaaaaaaaaaaattggttgggtgtggtggcgcataccagtagtcccagctacttggtggtgggaggatcgcttgagccctggaggttgaggttgctgtgagctgagattgtgccactgtactccagcacaggccacagaatgagaccctgtctcaaaaagaaaaaaagaaaaactgtgtgctgttagatctggcacagttagcacacagatggtattttattctgagttctaattgtttgccttattgctctagaaactatttagaagacttcactgctcttatactgaacacaccttatctgctggatctgggaagaaagtgatcaggagcaacttgggcttagctatattataattagaatagattgcagactgttaaaatagttacacacgtatgtgtctttttttgaggggagtatgcattgttcagctgggaaacacatttattttctgttggattaagcggtttcttaaagattcaataaataaaccactcacaacttagaatttgtttttcttaaaaatgtatgctaataccctgtgcattacctgtcttaaaaactggaacttataatgtggccttgaaaacagtgaaatgcagtgaggtttaatgggattggggccagaagacttgtataataatataaccttgggcaagtctcagtaacctgagcctcaggttcttcatgtaaaataggtatagtaataatcatctcacaaagtgattgtgaaatgtcagagattatcaaagttgataattacttatcaactttggttgagaatcatttgaacctcgggggcggaggttgcactttgtaatttgtgaagtgctaaagaaagttgtcattaaattatcataattcagccccagacctaatttatacttctgtctcctttaattggcctgattaaagtttgattcatttgcttttctgtacttaccttatgtggaatttgggaaaagtaagtatggagctggagccctgatcacttagggagaatctgaatgaaaaatggggaaacccttatatagaatcagtctgttgggagaatttgaatgaaaaatagggaaatatagaatcattagtatgttttcagctatttccctgtgagactaatcgatttaaaggctatacttagattttttttaatgacactttcattttatatgtagtatacattttctgatagttctgctggattatgcattctcattactaagtttcccactgcccaccattctgaaagataaattttcagagaagtaagttgtcttgttctttgtttgagacagggtctcattgtgtcgcccaggctggagtgcagtgccatgatcatagatagctcagtgcagtcttgacttcctcagcacaagcaatcctcccacctcagcttaccctgtagctgcaaccacagtcacttaccaccatgactggctaatttttttatttttagtagggatggggtctcattatattgctcaggtttgtcccaaactcctgggctcaagcgagcctcctaccttggcgtcccaaagtgttgggattacaggtgtgagccactgtgcccaacctgtcgtttttattgtgatgtgaatttgattgttttcttttttctttccttttttttttttttttttttgagacagggtctcactctgccacccaggctggagtgcagtggcataatcacagctcattgcagcctcagcttcccgagtagctgggatcacaggtgtgtaccaccacacccagctaattttttttattatctgtggagattgggggcggggcagggtggtcttcctagcttgcccaggctggtctcgaactcctggactcaagccattctcccacattggcttcccaaagtgctgtgattatgggtgtgagccacaacgcctggcttttttttttaatagtgtcgtgaactgctaagcttaagtgatctcctcacctcagccactgagtagctgggactataggcatgtactaccacacctggccatgatggttttcttaattactcttttaaggaagctattgtttcttgggaaagctcaagtaattcttggttttatttttgtaggctcagatcaccatgaaagtaatccaaggcttgtacagtggggtcaccacagtggaactagatactttggctgctgaaacagctgcaaccttgactactaagcaccctgactatgctatcctggcagccaggatcgctgtctctaacttgcacaaagaaacaaagaaagtgttcagtggtaagtctggggtgaaaaagtaaaaatttagtactctcagaaaagtaataagggtactagaaataaatcttgactgtttaaagaagcaaatatggctagatggggtggcttacacctcgaatcccagcaatttgggaggccaaggcaggcaaatcgcttgagtccaggagtttgagaccagcctgggcaatgtggcgaaaccccatctctacgttttaagaaaaatctaaaattataaaatagactaggtgcagtggctcacgcctgtaatcccagtgctttgggaggctgaggcaggtggatcgctgaggtcaggagtttgagaccagcctggccaacatggcgaaaccctttctctactaaaaatacaaaaaattagctgggcgtggtggtgggggcctgtaatcccagctactggggaggctgaggcaggagaattgcttgaacccgggaggcggaggttgcagtgagctgagactgtgccactgcactcctgcctgggcaacagagtgagactccgtctcataaataaataaataaataaataaatagcaaatatgtaaattagtgggaaagagcagactacaatttcgtatttctccatgctgcctatctgctgcataaaaaggttgatggatctttgttctttttttcattttctctttttaaaatttttttattttttttgagataaagttttgctcttatcgcctaggctggagtgcaatggtgtgatttcggctcactgcaacctccgcctcccgggttcaagtgattctcctgcctcagcctcccgagtagttgggactacaggctcccatcaccacgcccggctaattttttgtatttttagtagagacgggtttcaccgtgttagccaggatggtctcaatctcctgacctcgtgatccacccgcctcggcctcccaaagtcctgggattacaggcgtgagccaccgcgcccggcccaggaatctattttaaactacaagaacttataatcactttaactctagaagattgtttccttaaatgaggcattacatatttcttcaacatatatgtgtttattgagcactttatatgctaggcattgaggtgggttgagatgacaaaaagggttgagaaccactgttttcaactattacctaaagattgaattagctgttaagtggtcttgatatattttcattttttgttgtattttttagatgtgatggaagacctctataactacataaatccacataatggcaaacactctcccatggtggccaagtcaacattggatattgttctggccaataaagatgtatgtataacacttatctggtggaaattttttgagagtcttttttaataatgcacacattttagaaaatttaaacactgcaaaagatacaggtaaatactaattctgtttcctaccctgattcctgattttcctctctagaaacaactttatcattttaaaatgtatttttccagagctattttgtacatacgtgtgtgcatacatgtgtatgtgtgtacatacatatttttcttctcagtggtactgtactgtgcatacagttttcattgatactttcttcacttgtaagtatatcttgtttgttctatatcagcctttatgaatttacccttttttataacagttgtataacgttccattttgtagatatattgtcattgtatgtatgtgtaagaattcctttagtgatcaatatttgtttttcatcttttcactgcagtgaatattcttgtatggtaggtgttttgctcatagatgaatatatctgtaagataaatcccttcagtagaattgctgagccaatgtgtatatgaattcaaaattttgataggcattgccaaactgactcccaaaaaggttgctcaggtaaaattttacaagctcatgctcagcaacttaaaaattatccacttgtgtttgaacctgtttcttaactagatgccagaggacagaagggaaaagatgtagcctagccagcccttttacacacaggatttatttaccgtgtatatctggacagattagagaccagttttaactttaggtaatataatgattaggccgggcgcggtagctcacgcctgtaatcccagcactttgagaggctgaggcgggtggatcacggggtcaggagatccagaccatcctggctaacacggtgaaaccccgtctctactaaaaatacaaaaaattagccaggtgtgggagctggtgcctgtagtcccagctactcaggaggctgaggctagagaatggcgtgaacccgggaggcggagcttgcagtgagccgagattgggccactgcactccagcctgggcaacagagtgagactcagtctcaaaaaaaaaaaaaaaaaaaaagaatgattaattgactatctctctaaacatgtatctgatgttaaagagactaggagaaaactgagttgtttgtgtgttgttaatttgtgtaatctcgaagacaagttgaagacaaaaatacagcagcagcaacagcaaaacctgtgtctaaaaatatacctattgatagtcaagtatttcagttctctaatattcacactgggcccatacctgcctttggcaacaaagatgaccttaaaattttaagagaaaaggaaagcaagctttcgtataggtttttctagtccttagatatggatcattatgtagaaacactgtcagtattttgaaaacctggctccttttttttctctccaaaatgattatttgtacgttattgcttttattttcctctgaatgactttgtagcctacaaaaactctgtaacaaggaccagttatgctctaaaatcttactgttacaatagttctttgttggaaacttgttaaaggactatagattttgaagagcctcagaattaacataagcctgcttcctgtcattgtttattatatatactgttatatacagtttgaagtaggctagcttttaaaataaatatatatatatattagtaaatatgtggtaccaatacttttggattaatagccaatctaaaaacatgtttaaggatgataatatagtcccatttatgctcatgttttttccctctttcaaaacatactataaacataatagtaaaagtttggaaaatcacatttaatctcacaacatatatttatgtattatcttctagtgttttcatatacatgtttttaaacctaattaggatacttaatttatatgtattgtttcttttttttagaatgttagatggacttctattctacagtaataatgcttagtgttatctcattgtatcctgtgttgattttagttctggagtcagggccgagagataagagattttgtgaaaataagtaattattttaatttaattatgggttctttttcacccctatcagcgcctgaattctgctattatctatgaccgagatttctcttacaattacttcggctttaaggtaaataatgggtttcaagtatgtgggaatttatacttaaatcatgaaataaaggattttgtttatgttttggtgacagttatcaaggccataagttgtttggagttgagatggacctggggaattagtggggttaaggtagcagtggtggtttgaattaaggcaaaggtagcttatctatttgcagtttttgaattttccacatattacttctggattacctgaggagttatgcagataaattaccataagtatttcataacattctaagtatttttgcgttgataggcagtatagtatagtgtagtgactgagaacatgaatgtcagtgtccacctgaattccagtctctgctctatttcttattagcaagttatttaatctctctgtgcttgtttcctccattttagaatggggagaatataaaatttcaacaacaaatttaattaaaaaaaaattttttttttgagtctgtgtctcactgtgttgactaggctggagtgcagtggcgcgatcttggctcacttcaacctctgtctcctgagtataagcagttctcctgcctcagcctcctgagtgactgggactacaggcacacaccaccatgcccagctaatgtttgtatttttagtagagacggagtttcaccatgttggccagtctggtcttgaactcctgacctcaggtgatccacccaccttggcctcccaaagtcctgggattacaggcatgagccactgcggccaatttagtttaaatttcaatttaaagtgcctataacaggctgggcatggtggcttacgcctgtaatcccagcactttaggaagccgaggcgggctgatcactcgaggtcaggagttcgagaccagcctgggccacgtggcgaaatgccttctctactaaaaaatacaaaaattagctgggcatggtggtgcatgcctgtaattccagctacttggggggctgaggcaggagaactgcttatactcaggagacggaggttgcagtgagccaagatcgtggcactgcactccagcctgggtgacagagtgagactctgtctcaaaaaaaaaaaaaaaaaaaagtgcctgtaacagaccaggcactgctctaaacaacatatacactcatttaatccgctgaggaatccctgatgtatatgttgctcatttaatccccatgaggagtcttcaggggattaaatgagtgtaacgagtgtatatgttgcttagatccgtgcctagtctgttacaggcgctttttaagtgttagctgttgtgaagttgatgatgatgatgaatactacaacttctgttaatgtgtgtagagctggctttttccagaaattttcatgcagtctctgccgaaacaaaagtgccagtgaggaggctgagatgggaggattccttgagcttaggagtttgacaccagcctgggcaacacagggagaccatgtctctacaaaacgttttaaaaagttttttttaaaaaaagtgccaatgataattctggctaacatgacgaaaccctgtctctactaaaaatagaaaaaaaaaattagctgggcctggtggtgggcgcctgtagtcccagctactcggtagcctgaggcaggagaatggcatgaacccgggaggcagagcttgcagtgagctgagattgcgccactgcaccccagcctgggcgacagagcgagactctgtctcaaaaaaaaaaaaaaaagtgccaatgataatgttccagatgaagctaggaagagtaaatgtgctattcttttcatttgaaattttatagaaacggcgaagatttaaagagattgccttattgtggatgatatatccactgcgtctttaaaaacggtgctctgaaaattttttgttgtttctctctttctagacgctagagcggtcttatttgttgaagatcaatggaaaaggtgagaaatgaacatgtttgtctgttacattttctactcattatattgaatgtatagctttgagctataagtcttaatattcttgcttagactctagataacattttggactttaggtttagtttgtggataattgtcctgtttattagtataaagtttttctagtttccttttggtgtccttttctgaaattcaaatacgtatctcaacctactttttctgacgtctcatcatgtgaaaactcctcttttgtctatagtggctgaaagaccacaacatatgttgatgagagtatctgttgggatccacaaagaagacattgatgcagcaattgaaacatataatcttctttctgagaggtggtttactcatgcttcgcccactctcttcaatgctggtaccaaccgcccacaactttctaggtaggtgttttgagtagggaaatacgccttgacctgaagaaactgggcagttagttcatcacataaaaaataatttaatgaccttttagtagctgcctgctctgattaaatgagatttagattctggaaagatctctgactgtaatgtggtaaatgaattggagaaaaggcaaatgcttataacaaaaatgttctaaaattgattggattgtggtgatggttacacaagtctatgagtatattaaaagccattgagtagtacactttaaatggggaattatattatttgtgaattatattcctttttttttttgttgttgagacaaagtctcactctgtcacccaggctggagcgcagtgttgcgatcttggctcactgcaacctgtgcctccttggtacaagcaattctcttgcctcagcctcctgagtagctgggattacaggtgcccgccaccacacccagccaatttttgtatttttagtagagatggggtttcaccatgttggtcaggctggtcttaaactcctgacctcaggtgatccacccgccttggcctcccaaagtgctgggattgtaggcatgagccaccacgcttggtgtgaattatatttcaataaggttgttttaaaaagaaggtaagtgccaagaactagttaggggactcttatagcagtttatataagaaattgtggtagtctagattagggaggtgaaagtagaaattgacagaagcagatagatcaaaagatatttagggccaggcatggtggctcacatctgtaattccaacactttggaaggctgaggtgggaagatcacttgaggtcagaagttcaaggctgccgtgagccatgattatgccactgcactgtagcctgggcaacacagtgataccttgattaagataaaaatatatataaaagatatttaggctgtcaaattgacagaatatgggtcaagaatggttcttgcatttatggatacagtaagtaacaggattaatgatgatgccatttgttgagaaaaggaacactaacggtctggtaatacattaaaaaaaaaaatatgccattatcaagttggtttgtttcaggaattcaagaacatggtaacatcaaaaaatacattaatgtaattcattgcattaacattttatgcagtttaatgctctttcataataaacactttagcaaaattgatatagaaaataacttccttaatttggcaaaagatacccaataaaaacctagatgtatcgtctcttttttcagcatggtagtggaggcctgagccagcattgtaaaataagaaaaagaaaagattggaaatcagggaacaaaactgtaatgatttgaagaaatgatttttacataggaaactcaagagcatctgcagacacattattagaaataaaagatttcagcaaaatatctggatataggttcaatatacatcaatcagttatgtttctgtactttagctgttagaaaattaagtcttaacctacagccatgcattacttaacgatggggatatattctgagaaatgtgttgtaaggtgatttccttgtgcaaacattatacagtatacttaggtaagcctagattgtatagcctactacacacataggatatatggcatggcctgttgctgctcataggttacaaacctgtgtagcatgttactgtactgaatactgtaggcctttgtattaccatggtaagtatttgtgtatccaaacatatcacagtaaaagtaccctataaaagataaaaaatgggccaggcgtggtggctcacgcctgtaatcctagcatgttgggaggccgaggcgggcggattgcctgagctcaggagttcgaaaccagcctgggcaacatggtgaaaccctgtctgtactaaaaatatagatataaaaaaactagccaggcatagcagtgtgcacctgtagtcccagcgactcaggaggctgagacaggagaattgcttgaacctgggaggcagaggttgcagtgagccaagatcgcgccactgcactccagcctgggcaacagagcgagactccgtctccaaaaaagaaagaaaagataaaaaaaaagatacaaaatgatacatctgtataggacagttatcatgaatagagcttgtaggactgaaaattgctatgggtgagttagtgagtgagtggtgaatgaatatgaaggcctggctgggcgtggtgggtcatgcctgtaatctcagcactttgggaggctgaggcaggtggatcacgaggtcaggagttcaagaccaacagggccaacatggtgaaaccctgtctctactaaaaatacaaaaattagctgggtatggtggcaggcgcctgtaatccactacttgggaggctgaggcaggagaattgcttgaacctggaaggcggaggttgcagtgagccaacatcgcaccactacactccagcctgggcaacaggagcgaaactctatcttaaaaaaaaaaaaaaaaggaatatgaaggcctagtacattactgacgactgtagactgtacaaacattgtgcacactaaatttattttaaaaatattttcttcaataataaattaaccttcgattactggatgaccactgtcgtatgtgtagtccatcgttgactttttttgtttgtttttaagacagagtctcactcttttgcccaggctggagtgcagtggcatgatcttggcttactgcagcctgcacctcccaggtccaagtgattctcctgcctcagctttacaaatagttgggattacaggcgtgcaccaccacacccagctaatttttgtatttttaatacagacggggtttcaccatgttggccaggctgatctcaaactcctgaccttgagtgatccgtcttccttggcctcccgaagtgctgggattacaggcatgagctaccatgcccggttttttaagttttttagaaatttctctaaaacatgattaaaggacattaaataataaataaatggaatagattcaattttataaaaatgtcagtttttcccaagttaaaatatagattcaaagtaattctaggcaaaatctcaacatactgattctaaaattcatgtgaaagagcaaaagactgcccaaaaatgtcaggtcgaaattcctggaacctgtaaatgttacctgataaggaaagtggtctttgtagagatgataaggattttgacatggagagattatcttgaattatgtgggtgggcccttaatccaatcaaaagtatccttgtaagagagaggctgagggagataacgactcacagaaggggagaaagtgatgtaaagatggagggagaaattggagtcatgtggccacaaaggagagcaattagccactaaaagctggacaaagcaaggaacagattctccctcaaaacctctggagggagcactccaaaaaaaaaaaaaaaagtgagttgcagacattgtgactcttgatacctccacttacctttttttttgagatggagtttcgctcttgtcactgaggctggagtgcagtggcacgattttggcttactgcaacctctgcctcccgggttcaagcaattctcctgcctcagcctcctgagtagctgggattacaggcacgcgccaccacacccagctaatttttgtatttttagtacagatggggtttgtccatgttggccaggctggtctcgaactcctgacctcaggtgatccacctgcctgggcctcccaaagtgctgggattagaggtgtgagccactgcgcctggccctacttccacttatatctcgataggagaatatataatatgacctcagagcaaaacaccatagagcaaaacattggaaaaattgactacaattaaaaacttctgtgtgaaaggcaatggaagggcaccgtggatcaataaggccgagaggcgagacaaagagggcaaaaatcttctttattgagctctcgggcgaggttcactggtccgcagggggagggccagggaagtctcgctgtgccaaaggtgcagcgtgcttttatggatgctgggtgaggagtggtcagggtaggggcagggtcggttgagtttcacgcttctgagtgtgacacgccctagtgggcatgtgcgttagtcggggtggcaggaacaggaaaggtgaacccggaaatgctgagtcagggtgtccgaggtggcgatcgccatcttggagtcttcaccggagtccaatcactgtgaaccaaaaacgaagtcaaataacaagtttcacactttgggaggccaaggtgggtggattacctgaggtcaggagttcgagaccagcctggccaacatggcgaaaccctgtctttactaaaaatacaactattagccaggcgtggtggcgtatgcccataatcccagctactcaggaagctgaggcatgagaatcatttgaacctgggagacggagcttgcagtgagccaagatcatgccactgtactgcagcctgggcaaaagagtgagactctgtctcaaaaacaacaacaacaaaaacacccaaaaaaacaagtttcagactgggagaagatatttgcaacatgttaactattgagagattataagaaaaacaaggccaggtgcagtggcttctgcctgtaattccaacactctgggaggccaaagcaaaggctggcttgagggcagaatttgaaaccagcctgggcaacataatgagagcctgtctctacaaaagtagaaaattagccaggcgtggtggtgcacacctgtagatttagctacttgaaaggctgaggtgggaggatcgctcgagcccaggaggtcaaagctgctgtgagctatgatcatgccactgcactccagcctgggtaacagagttaaaccctgtctcaaaaaaaaagaaaagaaaagaaaagaaaaacagaaagccaaatagaaacatgggcaagggctataaacaaataatgcatggaagaagaaacttgattggctaataaacgtctgagatgttaaactgtgcaataggaaaatgaaaattatgtatatatatatttgataaaaatgaaaaggctgacaattccaagcactgataagaatgtggagcacaaggaaatctcatacattgctagaaatagatttgtccatccactttggagaatctttagtaaagtgaaacgtgtatatcttttgacccagcagttcctctcctaggttcatattctacagaaatgcttagagataaacacaaggtgttgtgttcaagaatttttatagcagcattgtttggaattgcaaatgaattggaaataatccagatgttcatcaacaggcacatgggacaaatgttttggtatatttatacaatagaataccttatagcaatgaaaataaagtttgtttacatatatcaaaaggattaatttctgtaaagcaatattgaattaaaacaagttgcagaatgataaacagatatgcaaccagaaaaattctaagtgtataacatgtaaaaatgtcataaaggaaatgcttgaaaatgttagaggattgcaatgagggtatatttgtggtgtctaattttttgaggtaggtggcaagtacagagtatttgttacatcattctctatatttttctgaatgtctgaatatttatataaacacctagtcaatagatagaatccatttgcatgattgaatattcaaggcagtgaagagattattgatagagtaaggttcctgaggtggggagcaggatgagatccaaagtgaggtaaaggggttgtctttaaaaagactgtaaaggagctatgattttggtagacgtatcaaagaattggttgacaattggagagattattttcataaatgtttgtttttcttggcttactaacaacctgaaaagacggtgatgtatgtttatgaatatgcatgagaaaatgtgaaaatagcacgtttgcagtctggtgaaaatgtaagccaatattttagacttatctataagacttcctactaggcttatttacttactatctaggggaggcagcaagatgattttaaaatgatatttcgatatgttttattgtgtcatgtacagtaaagtgggttttcttctttgaaaatcatttaggaactttctaaacttcaactcttttttttttttttgccttagtgtctttgtgttgagtaatcatttttgtgactctgcttcatttccttgctctaagttgagacattttttcccccgtagctgttttcttctgagtatgaaagatgacagcattgaaggcatttatgacactctaaagcaatgtgcattgatttctaagtctgctggaggaattggtgttgctgtgagttgtattcgggctactggcagctacattgctggggtaggtttctgccatttgacttttaaagggggattcaagtctaaaagcaaacagattcatggttgagagggcatatgctattttttgggagtcctgggtctctgttaaattactaaatggctatgtgacttggagtgagtcattttacttctggcttcattttcatctatgatattagatatttagatttgactagataatctctagaatcctttttagctcaggttttagaattctggcttattttagcagtaataagagcagttatcattgattgattgcttactgtatgttaagtttgttataaatgttttacatgaggtactcatttgacccttactacaacgctatgaggtaactatgattatagactcatgccaggaattttattccttaaaataaccttgtgaataaaggtaccattgtctaattttacaagtgaggaaattgagacttagaaagttgttactttctgagatcaatcacttaatatgtggtagagccaggattcaagatttatgcattgacactttatgatgtaaactttagccctttgttagtttactgttcaatgggagtcaagataatagttttggatttaaatcctagctccactacttaactagtaatgtggcctagagttagttattttgtgtctgagtttgtttccttttctgtaaggtgaagaaaatatctaactctgtagaataaagttccagaaggaaattattccattatgttgtgttttggaggtgctgtgatatatacagcactttacacagtggtagagtgagctattgctcacttatctttctagactgtttaaaggcttgtgttgggatcagaagggttaaagaatttgatgaagtatcttctagtcgtaggagtctctattttcttaacatcattctagagtccacttattgctgagaatctccttttaccttatttattgccctgatatagctatcgcatataattcttattgtaaattgccttgatttcttttgggaaaaaggcattgtagtagtgtttatattcttttttactctacccaaagtgtatctttatataacgacctttagaagatgtagagtttaaatttagctaccttgattttggatccctttggcctgtaattgttacatctcattataaattagaaatgccatgaggtaacttagtacataattgtaatttattcaacattttgttgattttatttgggcatttttccaaagcagaagtagagatggagagcaggtaaaacttcatagattgctacctagaaattaggcatcttttttgataaaagaatggggccatttttttcttttctttgctgagtgccctctgtcatttctatcatggtctctcttttagactaatggcaattccaatggccttgtaccgatgctgagagtatataacaacacagctcgatatgtggatcaaggtgggaacaaggtatgctccatgaattgaaagtactggaaatcagaactaaaggtgatttagtcatatacacttaagatggttcatttatgtgtagtttctaattaccttttttttacttgtaaaatcaatttgaggaggtataattattttaatatgcatatactttaaatgtacagtttgatgggttttgacaaatgtatacacttgtgtaatcaccacattgataaagaggtagaacatttccattaccccaaaatcttttctccctcatatacctttacattcagtcacccctgtcacccctacccacacatactttatccctggctctagacagccactgatctattcagctttcttacatgatagttcgtttgcaaagaatttctcaagttgtaattcatataaatttgttacttgaaatggggttgtaacatgtgctctaggtttttctttcgtttttttttttatctctctcttatcacccaggctggagtgcaatggtgcgatcttggctcaccgtagccttgacctcctggacttaagtgattcttctgcctcagccctcccatgtagctcagactataggcctgtgccaccacacccagctaatttttatattttttgtagaggcgggggtctcactttcttgcctaggctgatctcaaactcctaggctcaagcaatctacctgccttggcctcccaaagtgttgggattatgggtgttagccactgcacctcgcctaggttgttcttaaaacaaaaacaaaaactacctggaataacaaaactctccctaattggctggatgcagtggctcctgccagtaatcccagcactttgggaggctgaggtgggctgatcgtgtaagctcacaagttcaagaccacgagttcaagctcacgagttcaacatgacgcaaccccatctccacaaaaaatacaaaaattaaccgggtgtggtggcgaacgcctgtagtttcagcttctctggaggctgaggtgggaggatggcttgagcccggtaggcaggaggttgcagtgagccgagattataccactgcactccagcctgggcggtagagctagaacttgtctcaaacaaaacagaacaaacaaacaaaaactctccctaattgatagaagaaacagtaaagttgagagaattgggttgtttaccttattttatcaacaggatggtttacaactagagtctgccttttgtgactgtaggcacactaatcgcttgttggtttatgaatttctctctgatggactttggggaccttgataagacagatcaactttttgacctacaataagagcatggcttatactgtcaaagcaacttcctttgggctttatgtacatgtcatgtggtgtaaagagagctgggctgttgctgaagaggaggctccatctgtagttcatcatgtcactttagaaaagttaatcttgtttcacattttgtttatatcattcgttcgtttttactcatagaattgtaaaatattacttttacaattatatatggaaaacttacacttttataatacttttatttatgttatttaattcattgtagtgaaaatcaaaggagatactataaaagtgctttgggagacatgatgtttctttgtttcatttttattctgaagagaattatgatttatttaccactagcgtcctggggcatttgctatttacctggagccttggcatttagacatctttgaattccttgatttaaagaagaacacaggaaaggaagagcagcgtgccagagatcttttctttgctctttggattccggatctcttcatgaaacgagtggagactaatcaggtgagagataggtacttgttggtaatagcaacttgattcacatgagctttctcttttttagtcatcttaagtcatgcttaggaagagcccatatgtgtgtgatgccacagaaggcattctgaacaagttaagagatgccgtgcttgtcttcttatatttctattctctaaagtagatgctttgtgacctaaatgcttaaaaggtcatgtataaacaggcagacctagatgtttgggcctgaacctgaaaatgattatttctacagcaaatttccaagagagcttgtaaaagtcaccttatgcttgcagtgtttctaatggattatggttggctatttgaagtttcttatgagtgattttgtcctttcctttttaggactggtctttgatgtgtccaaatgagtgtcctggtctggatgaggtttggggagaggaatttgagaaactatatgcaaggtatgggaaaaatatgaaagaaaacaataatgttttaatcatggtttctcttatttcaggggtccaaatatcaaaagtacttgtcaagaatcttttgaagcatctaagagaaaaagtgactaataattttggtcagatttgcttcctgactcttcaccaaaattgagttgtgtcttcttctttcttaaaactttggaatgtataaataggttcttgggatttttaattgatccttttaaaatttaagatgactagtagggttattattttgctctgtcatatagtacttttgataagctatgctttatgttgcataaaggaatcatgagtgactaggacacatatgtcagtagtttattaaaattaaataggtcaggtgcagtggctcacatctgtagtctcagcactttgggaagatgaggcaggtggatcatttgaggtcaggagttcaagaccagcctggccaacatggtgaaaccctgtctctagtaaaaatacaaaaattagctgggcgtggtggtgcacacctgtagtcccagctacttgggaggctgaggtaggagaattgcttgaacctgggaggtggaggttgcagtgagctgagattgtgccactgcactccagcctgggtgatagaacgaaactccgtctcaaaaaaaaaaaaaggaaaaaaatttagcacagtcttaagagatttggcttccttagtttttactcctttttattatgaaagatattattggtttagtgggattgcgatcatctgaaggcacctaaaactgcctcattttcccctatggctttagctagagtaaaataaatatcatattcctttttttctttagcaaaacttagagaaaatttaagagttttcataactttatattttaatgtcttcaagttgtctacaataaagtttttttagggaatatatattaaataatattatctgtgcctttcagttatgagaaacaaggtcgtgtccgcaaagttgtaaaagctcagcagctttggtatgccatcattgagtctcagacggaaacaggcaccccgtatatgctctacaaagattcctgtaatcgaaagagcaaccagcagaacctgggaaccatcaaatgcagcaacctgtgcacagaaatagtggagtacaccagcaaagatgaggtaggtagaaaaaattcttcctagagtactaagaagagaaccttaggcagttattatttgtgaattcctcacttgatttcacttgagataagtgaagggagtttgcatagttgtaagcagaagaacactgttaaaggcagagagcaaaggaaggaaagggtatgatctgtgcctataaatgttttttagtctaagccgtgtgggaaagacacagttttttcttatacacacatcactgtaataacatttactcaagaaaaatagaaatatacagttatgttagtttaggacacacacaaaaatgtgttaggatgtacattcaatttaaactatgtaagccttgagcctggaaagtggaggctgcagtgggctgagattgtgccactgtactccatcctgggcgacaaagtgagaccctgtctcaaaacaaacaaacaaaaaaccaaaaacaacaacaacaaaagtatgtaagcttataaagagagtcctttcagtgaatggtgagatcaaattctaatctcaagtctgtaaagagacttcacagaagaatcaaggctagaaatgggacatggatttggtgttttaaaaaaaagtttgagagaggagctttccatttggaaagagtggtctgtatgatacaccagagacagggctgggttttatgcagtgtggcaagtaagtctgttttgatggtgcaagtagattaattattggaatatggagagatggctatggctgggggaagggagatagaaggtagaagctgacacgtcacggataggtagcccttgtaggtttctgagaggaaaatagcatcaaaatgttaagatgaaaaggaaggttcttgcttctggttacagagtgtcttgctgtgagaagggattagaggttagcctagggagattgttgtactagttggatgacaggctgctttgatcttggatgtaaactatggaaacgaggaaggagtagatcctcaattctaggaccttaaaaaaaaagacaaatgaaaagtcaggaagtaaatggaaagtgagttaaatatactgctaaggttacagtttaattcaaaatttattgtgcagtagctatatgtaaaacacaatgttaagtgctctgagaatataaataaatatgctgccctctggaaacttctaatttagttggaagacatcgacatatattgaggtaactattatgcaagacagattatattatagaggctagagtgacatttttaaaataaaaatcagataatgtcatttgtctgcacaaaactactctttggcttgctaacccatgcagaattccttttttttcggggggcgtcaagatttcactctgttgcccaagctgggctgtggctcactgcaacctcaacagagttctttctttttgcaaattgagctataattcactctttttaaaatgtacaattcagtgttttttttcttttcttttcttttcttttttttagtatatctgcaagtctgtgcaaccattaccactatctaattgtagtatttatttattttatttttttttttttgagacagagtcttgctctgtcaccaggctggagtgtagtggctcgatctcggctcactgcaacctccgcctcctggattcaagcgattctcctgcctcagcctcccgagtagctgggactacaggcgcgtgccaccacacccagctaatttttgtatttttagtagggacgaggtttcactatgttggccaggatggtctcaatctcttgacctcgtgatccgcccacctcagcctcccaaagtgttgggattacaggcgtgagccaccgtgaccggcctgtagtacatttttatcactgtagataatgaaaccctttatccattagcagtcactccctgttcccttcttccctcagcccttgacaaccactaatatattttctgtctctagatttgtggacattgtggacattccataggaatggagtcatataatatgtggccttttgtgtcaggcttctttcacttaacatgttcttttattcatgttgtagcatgtatcagtacttcattcctttccatccagagttcttacagtgccctacaaggtcctacacaactggataacccacctcatctgcggttactttcccctttgttcactttgctccaaccctattaattttcttgctttttctcaaacatgtcaaccatgctcctacctcaggatttttgctccttcttccctcttgaatgttaaaatgcaccccctcttcccatagccacatgatttgctttctaacctgttcagttctttgttcatatgtaacattttcaatgaggtccttcttgacaattctgtttaaaaattatacccccttcatctttatccccagtactctctgtcttcttttcctgcctatttttcttcctggcatttattagacttctgtgattcaagctatatttaaaaaaatgggtatttggcaacatgtgtagaatggagtagatgtgaagggcatcaagagttcaactgggaaactttcagtagtccatgtgagagaagttaagactttggcttgggatagtcataatcaaaatggaaaagaaagtgtattcattcaacattatcaagacttactgtgtgccagatgtgttgctagtgctaaacatataaatataaataagatgatccttgtgtgaagaagctcactgcctcgtgtagtggagaaatcactggaagagctttttcagaaatcacaaattgagatccattgttgctaagggcttgtcagaatatcagtgaaggtgaggtggacgtgtgtgttttgaagaactctgcagtgatggaaatgttctgtatctgatggctattgagcacttgaaatatgactagtgcaactgagaaactcaaattttatttcattttaaatagatatatgtagccagtggctaccatattgcagggcactcatctactgaataatgagataggtatatgtaaaaagctaattataacatagtgtgatatatgtctggtaatagagctgtgtactgtggaacatagggttctctctctctcttacctattttgctgatgcatgttataactaacacatatgactaggtattgaagaaatagaatcagtgggatttagaaatggactgatgaatgatgaagagggagaagtcaaatataaaaatttaaaattttaatgtctgagtattagaggctcacatggtggtgtaattgacacaggaagtagaaataaaaattgtgtgattcttgacctgttttttgcattccaggttgctgtttgtaatttggcttccctggccctgaatatgtatgtcacatcagaacacacatacgactttaagaagttggctgaagtcactaaagtcgttgtccgaaacttgaataaaattattgatataaactactatcctgtaccagaggtatgaatagatttctctgcttattggtaattattgaaatccaaattgaaaggaatcaatcatgatcttcaagtcatcatttaaatggttatcaataaaatggtttgagaaaaagaggtagtctgtctcatttggtacagaatgttgcttttcctgttcagtaatgttttctccttttctttaaaatctgttgacacaaaggcatgcctatcaaataaacgccatcgccccattggaattggggtacaaggtctggcagatgcttttatcctgatgagatacccttttgagagtgcagaagcccagttactgaataagcagatctttgaaactatttattatggtgctctggaagccagctgtgaccttgccaaggagcagggcccatacgaaacctatgagggctctccagttagcaaaggagtaagtatatggatggaattgtttttgcctgtgagtacctgtagtgggctgaatggtgaccccacaaaaggatatgtccacatcctaattcctggaacctgtgaatttaatttcatttggttcaaaaaaaggtattttgcagatgtaattaagaaccttgagataaggagatttacctggattatccaggtgagccctaaatctaatgacagttgtcctgcaagaggcacagaaggggaagcaacgtgactatggaggcagaaattggagtgttacaaccacaagccttggaatgctgataaccactagaagttataagaggcaaggaacagaatctcttctagtgcctctggagggagtgtggccctcccaacatgttgattttgggcttctggtcttcagaactatgagagaataaatttttgttaagttaccaagtttttagtaatttgttgcaccagccataggaaacttaaatacctttgtcctctggagtaaaaaggatactctgttttaatctcttatttagaactagtcattgctaaaataatgtaagagggatgctgccaatgttagttttctgtgggttaaaacatggcattcgttatctcacagtttccacaggtcaggagtccagacttagcttagctgggccttcttttctgggtctgtgttcaagatgttggtaagggctgtgatctcgtctgagacacagagttctcttccaagcttacctggttgttggcagaatatatttcaaggactcatggcatcttgcttctttaaggccagtgggagagaccatctctcgtttcaaaaggggcacagtctagtctcttttgagggttttcacctgataagttaggtccacataggataatgtcctcaccacccccctgtcccgcttttttttttttttttttgagacagagtctcactttgttacccaggctggagtgtgtggtgtgatcttagatcactgcaacctctgcttctcaggttgaagcagttctgctgcctcaagtctcccgagttagtagagatggggttttgccatgttggccaggctggtcttgaacttgtgacctcaagtgatccgcctgccttggcctcccaaagtgctgggattacaggcatgaatcactgcacctggcgtaatcttccttttatttaactcagaatcggctgatttgcaaccttaattacatctgcagaaacctttcacctttgccataatcgctggagtgacatgcatcctattctcaagtcatgtccatactcaagtggagattataaatagcctgtgcaccaaggtgtgggaatctgggaagctgtcttagaattctgcctttcccactgcctttattatcagtactatgattctttactatataaaatgttaatttcatttctgacattcctgctgatattagaaaatctaatgtgtggttattagaaaataggtgtttttagctaagtaaacagatcaagggacagatgaaggcactgaagaaagtaacatttttagtgttaaaaaaagagaatgtgtcagccacacccttttatgaatgttagagttttctggtttgtagatatgacatgggataatcagttttcttagcctgcttctgatcaatatgactacatggaattttgtccaggaaaatctctggagcttgtattcctcatagaggttgattagaagacagcatttgttgggatgtggggacatggcagctagtcatttgtgggttttttttttttttggtcatagttttaacttgctgtagaataaatttgagttgtgtattccttagattcttcagtatgatatgtggaatgttactcctacagacctatgggactggaaggttctcaaggagaagattgcaaagtaagtgaaaagatgtaaagtagctttgaaggcagaagggtttaggttcaccttctggatcttcagaagttagatatgtcattttaacttcttaaactcatttattacaaatggggctaaaatggcctatctcacaaaactattttgggaaaaaacttcgtaagataatatatatagtaacctggaagttgcttggcacaatgaaagcatttcagtacctggtaggaattactattattagttgatcttattttagggacttaacacacctagattaggtaattttctttctcattaaggcttttttccaactatgatttttttttttaaatgtttttcattcttatttatttcccaatttagttacatcgggcatataaatggcttttgtttgaattgattgtcataggaataatggattttggaagagtttttggagggtaatgtgtttagactatatgaaaaaaaaatttttaaattgagtttttgtaggcctttcaaactaataagcataagggattcgaaggcagacagaatgttttgcagagtgaataacaaagcaaattgtttttgttttctatcgtgatgactttgtcatttatgggttaatgcatatgcaaagtgattaatatttggagaatgaagcagtagctttaaaatgctctttaaaaaaaataaccgtttgccttaaaattgttaaattaaaattgttttcctactcaaataatacatgttagaaaatttaggaaaacatagatttggaaagagaaaatgaaaattatactaatactgcctcccccagaaaacctgtgtgcatcttagtgtctgtcatcctttaggttttcttccaagagtacacatacatgtgtatttacatggaaattcaacttttaagaaaatggacctgtactgtatttatatatatatatatatatattttttttttttttttttcccctcaaaatactatggcttagttttttatatacatgactttttttctaatttcaaaattagtatatgaacacaaatttattattaataaagctcaaatacagaaataaaatagaaagtaaaagcccttcttcatacttctgccaaccatttgtctcagaaaacaaaccaaaaaagtaacttattctttttcccagagataagacttgttaatggtgtgtatttttctagatctttttcagtacatttgcagataggtacacatacacggttttgtcatataaatgtgatcaaacttgatgtattctgggctgggcaccatgactcacgtctgtaatcccagcactttgagaggctgaggtgggtggatcacttgaggtcaggagttcaagaccagcttgggcaacatggcgaaacttagtctctactaaaaatacaaaaattagctgggcgtggtggtgcatgcctgtaatcccagctacttgggaggctgagacatgagaatcacttgaacctaggaggtggagattacagggagccgagatcatgccactgtactccagcctaggtaactgtgactctgtctcaaaaaaaagacttgatgtattctgagacttgttatttagtgatttattttggagctctttctcttttagtacctgtaggtctacctaatgtttttaattattatagacaattccatagtttgaatatatcatatatgtaggacttttcacaacatttacctgtctgtagacagatgatgttgctattttacagatgaggaagtaaagacatgaagatagttggtggtttgcttgatacctcactacaaagtgacagagtaaggtggagaaccaccccccaaaaaaagtaaataaaaaaataataataactaaaaagtagagaacccagttgtattagtcgattctcacacagttataaagaactgcctgagactgggtaatttaaaaaggaaagaggtttaattgactcacagttccgcagggttggggaggcctcaggaaacttacaatcatagcagaaggggaggcaaacaggtccttctttaatacggcggcaagcaaagtgctgagtaaagggagaaaagccccttataaaaccagatcttgtgagaactcactatctcatgagaacagcatgagggtaacctcctctgtgattaaattacctcccgccaggtccctcccgtaacgtggggattatgggaactacagttcaagatgagatttgggtggggacacagccaaactatatccagttgtacagactccgtcaggatatgaggctgtatgctaagcactgtatgaatccataggtatagaatgtaggaaagacaggctctttgtgttttaaaaacttgagactaagaaaacaagtagttaaggtatacggaaaggtacaggtcagagaaaatgtttgcagagtagatatttgtatttgacatttgtatttgtgcctgcctgatgaggaaagatgttttaaaattgctatcaattaggctgagctttgaaggtgagccaggggcagttgggagatttctcagtgtgtcagatagtgtattttctcttattagtcaaaagatgttaaccttcttgcaggaacttataattgaagaatatactttgagcataatttcttcctctttacaggataatggagaattgtggtgatatttctctgattctgaacactttctcatcattatttttccagaaggggcctagcacaatgattttataggcacttggaaaagagtgagggttggatgagtgtaacctaatacaggtggggagcgcttcaacagtgatttgaatatttccctacgcaagatagtgtatcaagtgttatgattcctgagtgccacagtccaagtggcataaatcatggtatgataaggatagccaacaataaaaattgtactaattcagtttaggagtcaggcatttaagaggagagtgggctataatagcacccatactgtggaattgcctccctgtaggagtttaatttgaaagtcaacgtgtgagttcaatgcatgtacgatgttacatttacatttactacatttatctacatttactacagtgacttaaagtagctgctttcctggcagattgtagctttgggactagtacctgataatctccttttctttaggtatggtataagaaacagtttacttattgccccgatgcctacagcttccactgctcagatcctggggaataatgagtccattgaaccttacaccagcaacatctatactcgcagagtcttgtcaggagaatttcaggtgagcagttcacaaccagccttacagggagatctttcaaaagcctgatgttgggagtaaatgctcactcatgtttaatttgcccattttcttagtttgggtgcaaactttgataaagacagtcatcttcatctctaatattattatttgttattaatatttcagcacaataggcatttaataaataatctgttgaaagaatgagtgaatgagggtcgagtatgaaagtaagttgttgatagttaaacatgatgtttaaccattatgtaatcatagtgatatattctataacttctcccagatgcttaagttaggatactcaaaatgtataaagaagtatcatttaaggcagtggttctcagacttggttaccaattagaatttatggtgggtgagaccagtggttttttctttgtttttaaggttcccaggtaattcttatgtgtagctagggttgagaacctcaatttaaaagactatttgtgaatttccagatatcttgaagtaaagttctgtaaagttcgagaaggatacgtttccaatttttttaacctaagtatttatagatttacccatcttaggcgctattcttttcacttttgcaaacgccatatgtttcttttttaatgaaaatattttttcagctttattaaggtataattgacaataaaaattgtgtataaaaccaaggtatacagtgtaatgattagatatgtgtatatattatataacgattaccacaccacaatgtttttgttgtcgatactgtttttgagaaaatgtctcactttgtcacccaggctggagtgcagtggcatgatcttggctcactgcagcctctgcctcctgggttcaagcaattctcatgcctcagcctcctgagtagctgggattacaggcatgctgcgccaccatgcctggctaattatattgtttcttgaataacagatgtcaagatcttaaaggaatatagctttcgtgtggtggcattgatgtctcgtctttataaaagatagaatttaccaagcaatctagcattaaataactcttaagtgattttagtttaagcttcaaagctgtagtcttttctaagcagtcactgttatttatttcttcatacattttctgcttttccattcagattgtaaatcctcacttattgaaagatcttaccgagcggggcctatggcatgaagagatgaaaaaccagattattgcatgcaatggctctattcaggtatagaatgaaaatgaagtgtgctctgcaggggctgagttggacattgtggtacctcctcactcatgctagacaatggagagaatgacttcattgtgttcatctaggttttgcttgtgtagctctgttcacctctgcattgttgtgctaggattgtacacatctttacataacccttaccatcttgtttttatgcaataatataaaaaagtagttctcaatttttctgcatcttagaatcaactggggagcttttaaaatcctgaagcttaggttgcattccttaccaattaaatgtctaggaacaggaaccagacatcaattttttttttttttttttttttttgagacgaagtctctgtcgcccaggctggagtgcagtggtggaatcatggctcactgcaacctctgcctcctaggttcaagcgattctcctgcctcagcctcccaagtagctgggattacaggtgcctgccaccacgcccggctgttttttgtatttttagtagagacagggtttcaccatattggccaggctcctgacctcaggtgatccgcctgccttggcctcccagggtgctaggattacatgcatgagccaccgtgcctggcctcagacatcaataatttttaaagattcttttggtgattccaaagtatatcaaaatttgggggatcatagatagaaagactgaaattaagagagtcaagcttaattaaaaatcatggttgacgactgatagtccaaaagacagagtcacaaatcgtgtaaatatttgcaactaagagtcaagaggcatttatttgcagatagaggtgtctggctaaatgttggtctgcttagcaacacagatgaagagtcctataacagttccatatttaatgacagaaactgtagcattagccagtctgtgtgttttaatgaaagttaaccctaggcctaagaaaacctgattttggattccaaagggagtttgaaatcctagcttatttaaagggttttatctcattgcttcccttggtccctgtgaattacagcccttattttttgtgttttctgcaaaactcaagggtcatttattgctgcttagctctgacttttcctttctttaagtgcctctagaagaatgaatgtttgggtcataaatcaattaaaaaattaaaaaattggtttatgaccaacaaaaaagggatgctgaaattactatcaccagattgatatttggttggttagatgggggttttgttcaactttctaaatagtcttggtaaacttgataaggatcatatcatatgatactgaatggtaaggtcagatctggcaggaagtaaaatgaagatcaaagcttgtgtcactattctattaatcatacactgctttctttaactggagtaaagtaaacattgggttttccttctttagagcataccagaaattcctgatgacctgaagcaactttataaaactgtgtgggaaatctctcagaaaactgttctcaagatggcagctgagagaggtgctttcattgatcaaagccaatctttgaacatccacattgctgagcctaactatggcaaactcactagtatgcacttctacggctggaagcaggttggtagagaatatcaaggagtacttaattgccagcttgagatattttggcattggaatgattttatgttttagccacctattaaatattatcacctagaagttctttaagttcaaatccagaacgttaaaaccaacccatggtttttgtaccagaacagggtcttgccttggattttcttgtttctgttaggtttatttccttcttaggtttgaaaccttgtagttacctgtgatgctttccttcctttactgtccgtacaattaccaagttgtgttgattgttcctttgtattatttcttaaatatcttccttccttttctgctgctgttattctaaactgaccttattgcttctaggatctctgctcccagccattttgtgtgcattaccaccattcctcagataaaactttgcacacgtcaacccgctattcaaaaacatccattgttttctcactttataaagtgaaagccagcttacttagctagtcgttgccagctgtaaagtctggtgattttggattatgttcttattccctgataatgtattgggtatttaagtagaattataaatttgttttttaatttaacatttattgaacatctagtatgtgccaggactgaggatactgaatagaagatgatgatctttatctttgaagtcttatagtctgttgttacacagagacacagtctagctctctaaacagttataacctaaggcagacatattgtcttgggcaaacctggaagtcatatgcataaaaacaaagacaaaagaataaaaatgtttgacctttccaaagagataagcctgttttaggagtgaaaagaacaggatatttctgtctgactcacaaagcatttttgagagtactcctagaggagatagaattccaagtttaaaaaaagtttgatctggttcatgggaatgtattttattttatgtatgtatgtatgtattttgagacagagactcactctgttgccccggctggagtacagcggcatgatcttggctcactgcaacctctgtcctgggttcaagtgattctcatgtcttagcctcctgagtagctaggatcacaggtgtgtgccaacacacctggctaatttttgtatttttattagagatggggttttgccatgttggccaggctggtctcaaactcctggcctcaagcaattcacctgcctcggcctcccaaagtgctcgaattacaggtgtgagccactgtgcctggccaggaatgtattttattttattttaatattattgttttattttattttatacttttttagacggagtctcgctctgttgcccaggctggagtgcaatgatacagtcttggctcactgcaacctcagcctcctgagtagctgaaatttataggcatgtactacccctcttgggggattacaggcatgagccacagcgcccagccaggaatgtatttttttgtttgtttgtttgtttgttttttctttttatttatttatttatttatttttattgatcattcttgggtgtttctcacagagggggatttggcagggtcataggacaatagtagagggagggtcagcagataaacaagtgaacaaaggtctctggttttcctaggcagaggaccctgcggccttccgcagtgtttgtgtccctgggtacttgagattagggagtggtgatgactcttaacgagcatgctgccttcaagcatctgtttaacaaagcacatcttgcaccgcccttaatccatttaaccctgagtggacacagcacatgtttcagagagcacagggttgggggtaaggtcactgatcaacaggctcacaaggcagaagaatttttcttagtacagaacaaaatgaaaagtctcccgtgtctacttctttctacacagacacggcaaccatccgatttctcaatcttttccccacctttcccgcccttctattccacaaagccgccattgtcatcttggcccgttctcaatgagctgttgggcacacctcccagacggggtggtggccaggcagaggtgctcctcacatcccagacggggcggcggggcagaggcgcccctcacctcccagacggggcggctggccaggcggggggctgaccccccacctccctcccggacggggcggctggccgggcggggggctcacacccccacctccctcccggacggggcggctggccgggccgggggctgaaccccccacctccctcccggacggggcggctggccgggcagaggggctcctcacttcccagtaggggcggccgggcagaggggcccctcacctcccggacggggcggctggccgggctgggggctgactccccccacctccctcccggacggggcggctggccgggcggggggctgacccccccacctccctcccggacggggcggctggccgggcagaggggctcctcacttcccagtaggggcggccgggcagaggcgcccctcacctcccggacggggcggctggccgggctgggggctgactccccaacctccctcccggacggggcggctggccgggctgggggctgactccccaacctccctcccggacggggcggctggccgggcggggggctcacacccccacctccctcccggatggggcagctggccgggcggggggctgacccccccacctccttcccagatggggcggctggccgggcagaggacctcctcacttcccagtaggggcggccgggcagaggcgcccctcacctcccggacggggtggctggccgggcgggggctgacccccccacctccctcctggacggggcggctggacaggaatgtattttaaatattggtgtggaatgtctagtattctcacagagtttctcctaataattgtctttactttccttgtagggtttgaagactgggatgtattatttaaggacaagaccagcggctaatccaatccagttcactctaaataaggagaagctaaaagataaagaaaaggtatcaaaagaggaagaagagaaggagaggaacacagcagccatggtgtgctctttggagaatagagatgaatgtctgatgtgtggatcctgaggaaagacttggaagagaccagcatgtcttcagtagccaaactacttcttgagcatagataggtatagtgggtttgcttgaggtggtaaggctttgctggaccctgttgcaggcaaaaggagtaattgatttaaagtactgttaatgatgataatgattttttttttaaactcatatattgggattttcaccaaaataatgcttttgaaaaaaagaaaaaaaaaacggatatattgagaatcaaagtagaagttttaggaatgcaaaataagtcatcttgcatacagggagtggttaagtaaggtttcatcacccctttagcactgcttttctgaagacttcagttttgttaaggagatttagttttactgctttgactggtgggtctctagaagcaaaactgagtgataactcatgagaagtactgataggacctttatctggatatggtcctataggttattctgaaataaagataaacatttctaagtgattgtatgagattaattttgtcatttactttcatataaaagtcaaatttgaaaaacacattttctgttctttgagaattcagggaggaaattatatgcctttttcttttcttttcctttctgtagtaaaatatacctaatatacaatttaccattttacccatgtttaaacataaaattcagtggcttaagcacattcatagtgttatactaccatcaccactatttgtttccagaacttcatcatcccaaacagaaactctgtatcaataagaacattaactccccctttcccctccaagtccctggtaacctctattctactttctgtctctatgaatatgcctcttctaggtacctcgtataaatggaatacatgtctggcttatttcatttagcataatgttttcacagtttatccatgttatagcatgtatccaaatttcattctttatgtataccacacttttttttttttttttttgagacagagtcttgctctgtcacccaggctgtacgatcttggcttggctcaccacaacgtctacctcctgggttcaagtgataagtgattcttgtgtctcagctttccaagtagctgggactataggtgcgcgccaccatgcctggctaatttttgtatttttggtagagaccagatttcaccatgttggccaggctggtctcaaacttgtggcctcaagggatctgtttgcctcggcctcctaaagtgctgggattaaatgcctgagcctccacacctggactaccacactttgttaatccacttatcttttgatggacatttgggttctttcctccttttaaggaattttgactaatgctcttgtgaacattggcttaaaagtatctattgagttcctgctttcaatttgtttgggtatgtatacaggggtgaagttgctggaaattatggtgattctatctttaactttttgaggaactaccaaacttttccacagcagctacattattttacatttccaccagcaatacaatagggtaccattttctccacatcttcatcaacacttatttttcatatttttgttttgttttgttttttgagagacggtcttgctctgttgcccaggctggagtgcaatggtaccatcatagctcactgcagccttgatctcctgggctcaaacaatcctcccatctcagcctctcaaagtcttggggttacaggtgtaagccaccacacccagctcatattttttataatagccatcttaatgacttgacaatttcattataatgtgtcttggtgtgggtctctgagtttatcctacttgggacttcctgggcttattggatttgtagattcacatcttttgttaaatttgggttgtttttggccattatttagataatttttcttcccctttctctttccttatagggacttccatagtgcatctattggttgacttgacggtgttccataggtctgttaggcgttgtttacttttctttattttttctttctattccaagacttgataatttcagtgtcctatcttccagttttctgattctctcttcttcctgctcaaatctattgttgtgctcctctagtgaatttttcatttcagttattcttttcaactccagaatttttattcttctttgtaatttttgtctctgttgatattctgattttgttaatcattgtttttctgatttcctttacttatttgttcatcttttcctttagctctttgagtatatttaatacagttgttttaatgtctttgttgagtaaatccaatgtcttggctttctcagggatggtgtctatcattttttcttgatactttgaatgggccatgttttctttctttccttttttttttttttttgtatgccttgtaatttttgttgttgaaaaatgggcatttgactgttataatgaggtaactccagtaatcagattctcctactccagagcttactgttttttgtttcattgctatgttgaagactgtagtactccatttgagacatttccaaactttttttttttttaagacagtgtctcgctgtgtcaccccaggccagaatgcagtggtgtgatcttggctcaccgcatgctctgcctctggattcaggcaattctcatgccttagccccctgagtagctgagattacaggtgtgtgccaccatgcctggctatattttgtggtgttagtagaaatgtggttttgccatgttggccaggctggtgttgaactcctggcctcaactgatccacccacctcagccccccaaagtgctggcattacaagtgtgaaccaccacgtccagcccaaactaatttttcagactattctttgtcacgtatgattgccaaagtctttgttcctttagtgcatgttcagttattgttttgacagagatatatgataccttcaaactttttgtcacactaataagattggctggttgcttttaattgcactggacaaattggagaaagaaaaggatgactttagtgatttgaattctcaacttaagtactagacctgaacatttctgtttctgctttgaaagaaactttacgttctgtagctgcagagttgagatttctgaaaccaaacccagaatctcattttgcaagtgcctgagttacaatgcaaattgaattctgagccttgcagtgtgcctttgctattaaagtgaggatattgactaggaatgaatgggatcctgaaaattggaatggtgacatatgggaagatcctgttgaagctggtaatattgaatctctaaattctgatgagtcttcattgccagtagaagcagagttaactgatttacccaaactgattatacctaattgacattaactgctttccctgaggaaactgatgtcttcctctgagataattgccttgcaggacactgctgattgtcctcaggacccaccctgaccacccctctttggttctaaacctataactagattcaagtcccagcaggccccaaaggtgaggtacaaagtgagatctatgaggaggtgtgctacactcaaaaagaactacatgattcttcccatttgagaatatgtgtggaaatggatattaaggatatgtgataatggtggaaggaacataaagttggatcaggctcagtttattgataggggcccacaaagcagaggttttggatttaatattgcagcatgggggatcgaaaagtgcctgctctagctggttggttggttggttgaaacatggaccaaaatttgccctaagtgaagttgaaatgccagtcctgccttggtatactatagaggaagtagttcaaaggcttagggagatcgaaatgttagagtggatttatcatttaaaagaccagctctcccaccctgagggaagtctggaggacacttcaccatgactgtgagaagtaaatttgtgagggaagcctcagcatccttaaagacctctgtgattgctcttttctgtaggtctgaaattacactgccactgaattgggaaacctaaattcagtgggagtaattggatcccatagtgccaggtagagacacttaattgccaaaggcagggtgggaatagttactataatggacagcagagttaaagcagcaatcagaatcgtctgacttggccagatgcagtggctcacacctgtaatcccagcactttgggaggccgaggcaggcagatcacttgaggtcaggagtttgaaatcagcctggccaacatggtgaaagcctgtctctaccaaaaatacaaaaattaacctggtgttgtggcgtgcatctgtaatcccagctacttgggaggctgaggcaggagaattgcttgaacccaggcggcagaggctgcagtgagctgagattgtgccactgcactctagcctaggtgacagagcgagactctgtctcaaaaaaaaaaaaaagtctgactcacagagatacggtttggctagatgatcatggagttcctcgaggtgaaatacatggggaatctattaaattctaacttgatctatataagcagaagagtttccggttaagtgaacaagtctaatttgaataataaaaccagaattatggcccctcaatcaattcccagatttgaactagtttacagacccagaacccctcaaatgaaagggagaccaagtccccttgaggaaggatcccactgcactatcaaagatatatactgttaaatctttctcccagcctttcccagaaggatctatggccttttactagtaactacattgggaaaaagagataatcaaaccttttgaggattactggacacagactctaaactgacactagttccaggaaactaaaacgtcactgtgatcttccagctggagtaggagcttatggaggtcaggtaatcaatggagttttacctccagtctgtctcacagtggctccagggatccctgaaaccatcctgtggttatttcactatgcagttcgggaatgcgtaattggaatagatacactcagcaactgacacagagaaccaaccatattggttctctgacttgagtgagggctattatagtgggaaagttcaagtggaagccactagaactgcctctacctaggaaaatgataaaccaaaatcaatattgcattcctggaaggatgccagaaattagtgccaccatcaaggtcttaaagtatgcagaaataatttccaccccatccccattcaactcacctgtttggcctttgcagaaaatacgaattttggagaaagacaatggattatcataagcttaactgggtgattactccaaccagaggcagttctattgcttgagcaagttaacacatatcctcatacctggtatgcagctattgatctggcaaatgcttttttctccataccccttagtaaggaccaccagaaacaagtttgttttcagccggcaaggccagcaatacaccttcaccatcctgcctcatgagtatataaactctccaaccatatatcatagtttagtttacaggattttgatcagctttctgttccacaagataccactctggtccaatacgttggtgacattatatcgattggacctatgagcaagaagtagtgacttctctagactcattggtagaatactggcatgtcagaaggtgggaaatctcactaaaattcagggccaccttctacacaggacaatttctaggcatctagtgtgaggcatgtcgagataccctttctaaggttaaggataaattgttgcatctgacgactcctacaagcaagaaagaggcatgatacttagtgtacctctttgagtcttggaggtaaaaaatcatggtaaccatttccagcttggttatggcaactgagtgcctccacgtgccactctgaaatctaattactcccattgaatttaggtttcatttggagcagcacactggggcatgctactccatcctgtttaccaaaagctgctagttctggggcccagaactacacaaggcactgccacaggtccaggctgccagggaagtttctctgctacttgggccatctgatccatcagatccagtggtgcttgaagtggcagtggcagatagagatgctcattggaggctttggcagacccctgtaagtgaatcacaggacaggcccttaggattttggaccgaagccctgccatcatcccctgtgggtaactactctccttttgagaaatagcttttggtttgccttagtagagactgaacacttaaccatgggccaccaaattaccatgtgacttgagttggctgttgtccgactcaacttgccataaaattgagcatgcacagtagcagtccatcatcaaatggaagtgatatatacaaaatcaggctcaagcaaaccctgaaggcacaagtgaccatgaagaagtgacccaaaatcccgaggtctccagttctgctacactgccttttcttccccagcctgcacctatggcctcatggggagttccctatgatcaactgacaggaagaaaaaactcaggcttgtttagtagataattctgtgcagtgtgcaggcaccgcaccccctttctgggacattacctgaacacttttcccttctgtagatgataaggagctgtggacgttttttttgttttgtttgtttttgtttttgtttttgttttaattttgagacagagtttcactctgttgcccaggctggagtgcagtggctcgatcttggctcactgcagcctctgcctcctgggttcaagcgattctcctgcctcaaccttccaagtagctgggactacaggcgcacgccaccacaccgggttaatttttgtatttttggtagagacgggctttcgccatgttggccaggctggtctcaaactcctagcctcaagtgatctgcctgcctcggcctcccaaagtgctgggattacaggtgtgagccactgcccagccagagctgtggaagtcttttaagcaggggttagcttttaggtagatcacattggctgtcataggaagaatggcctgactatgggtttggttccgactttgatctggatcccagatcagggcttagtctggtttttgggtcagacttgggctccagtgcaggaccctgtctgtgtgcctgaggtcagcacggtggcctcaaaatgtgacctgtgtgtttggctgagtttgggtttcccagggtagggtctactgtggtctttgggtcagactgggaccccgaagaagacctggtctgggtgtgtgtcagactggggacccttgggcaggagctgacctgtttgtgtgggctagactggacatcgcagggtaaacctgacctatgtgcctgtacagcttggggatctcaggaaaggacctcacttgtgtttgggactgactggactctagaacccagcctgctacctggattagactggaagcctcaaggatgacctgtgtattaggtctgaataaacttcatgtcaagcttaggctatgtttgggagagactgggcttcagggaagtgcccgcctgtttatttgtttcagactgggtgttgttcagacagggcaggttgtggtctgtatgacttgctctataagactaccttagtgaagccccatacatccagatattagttgggacttcctcaggagttgggaggaggacagagaaaataaaccaagaaggataaataggtaaatgcaattttattactgggggtgaaaacaaagagcattctaagaatttaacaagcaacagttgaccaacagggaacctgctgttgagcccgtaatctgctgaggaaatttgagcctgtccctgagtactgcctgcttatctcttctcagagatcatagccccaactttcgaaggtagtaaagtccctcaccctggcggtttccagtctcatgttctgcagcctctttggcttctccccagccttctgggctgtttccttttcacagagcatcttttctacatgttgctggatctccctagtcctcaccccataaatgacaggattcaaggctcctggaagcagcaagtatatggcactgagtagattctggacattctgggacacagtcttggctactcagaaggtgatggaagtggaaagaccagagacgtagatggagaggatgaccagtaggtgggagccacacgtgtgtaaggccttggcttgggctccccaagaagagatccggaaggcagcatagatgatgtgggtgtaggaggtccccagcagggccatatcagagattacagtgaccaaacacatagccagccccagccagttgttgaaggtcaggtctccacaagctatgctcagcagtgcaatgcactcacaggtgaagtgtcgaatcactgctgtccggcagaatcgggcttttgcagttagtactaccaagggcactgtcactcccaggctctgtgtcaaggcaagaatggccagcagtcccagcagctgggaggtcatcaggtcagaatagcagagtgggtggcagatggctacgtagcagtccagggccatggccagaggaagttgtagtccaggaggagggtgaagtagataaagaacacctaggccaggcggccatgcagcgatatggggttagcataatatacaaagccctccagcattttaggcatcacggctgtggcagcacgaatattgacagccaggagcacagtgatgagcatacacgtaggctgatgcagattttgccgggcaaccactgtgtggatgaccagggcattggcagagatgatggtcacaaagaggaagacaagaggcaggaccagaaggggccaccactctcgaagtccagggaaacccaccaggaagaacttggtgcaggagatgttgaaggtgcttgtatttccatcctcacccattagctttggccctgggccggcaccaagagtggggatcagagactgttagaacaaaatggtcaattttaaaaagactttttctgttgtagacactgaggaatttgtgataaaagcctacttcttcatgtatgtattcctttggggcacagataagtactaagccgggtgttgtaggaactacacagttacctacaatctttgtaggtaacaatctttgtcctcagggagctcttggcctcatgtgtgtgaaatgtaaatgtaaacttacaagatacttgtttacttgtaatgttccagatatttgctcagtaaaagattaggaggagaagtaggtgtagtatacacaggggaaaaagagtgacagccagagacaaaacaagaaaggttaaaagaagactcttgattcagaggaagagaaagtattagaagaatctttgatccaaggagtctgggaaggcccaagtggggcttaacagggagagaagaaccagccgggaatgatggcatcacttgtgtgcttgggacacactgtggcaaggagagatggaagttgctgaggaagaattctggtcttcctggatcacaagaaacaggctgcagagactgcttccttcctaagtcctcgtagattggctgtggtgcctgctgcctggccttgtcctcagtgtcatggatgatgagtttgctttcctttcagaatgtaggttccaggagggcagggataatagcatgcttctggtgggctcactggagctccaagcacagagtcaccatagaggcgcaggacaggcttgagaattgcttgttgagtaggtgcatgaggaacaggaagaagacaataggaggctgaacatttaattgggatcttacagcagttgtttcaaagctttggccaggggccaggactgttctacatacctgatactccacaaactaggcagcattcaacagtcttcaagctttttttttttttttttttaagaggtagggtcttgctattttgcccaggctgtttttgaactcctggactcaagcagccctcttgcctcagcctcccaggcatgagccactgcgcctggtcacttcaagcattctgaatctcagcagcaatatgaagagttagcatttattcagtacttgctacctgccagacatggttccaagtgttttccatgtgatatctctttaatacttgcagaaatcctaagagacaactttagctgtccctttgtatctgcgggagattagttccaggacctgctgtggatatcaaaatctgcagatgctcaagtcccttatataaaatggtgctgggaaaactggatatccatatgcagaagaatgaaactagatgccctacctctcatcctatacaaaaatcaagtcaagatagattaaagacctaaatgtaggacccaaaactataaaactactggaaaaaatatagatcagggaaatgatttagacattggtctgggaaaagactttatgaataacctcaaaagcacaggaaacaaaagaaaaataagcaaatgggattatatcaaattaaaaagcttctgtacagcaaaggaaataatcaacagcgtgaaaagacaacctacagaatgggagaaaatatttgctagctatttatctgacagaggattaatatccagaatatataaggaactcaaatatttcaatagcaacccccccaaaaaacaattgattaaaaatgagcaaatgatctgaacagaaatttctcaaaagaagagataaaagggcaataaatatatgaaaaaatgctcaccatccctaatcattagggaaatacaaatcaaaaccacaatgaggtaggctctcaccccagttaggatggctattatcagaaagacaaaaaaaaaaatgctgcagaggatgcaaagaaaagggaactcacatatactgttgttgggactgtaaactattaataatacaataagctattaataagccactatggagaacagtatggaagttcctcagaaaactacaaatatagctaggtgcagtgacttatgcctgtaaccccaggcactttgggaggctgcggtgggaggatcacttgaatccgggagttcgagaccagcttgggcaacatagcaagaccccatctctacaaaaagtaaaaaaattatctggacctggtggtgtgcacctgtcatcctgactactcaggaggctgaggcaggaagattgcttgagcccaggaggtcgaggctacagtgagctatgatcatgccactgctctccagccttgggtgacagagtgagatcctatctctaaaaacaagcaaaaaacaaacccaaaaaactacaactagagctactatatgatccagtaatccactactgagcgtttatctaaaggaaacaaaatcaatatattgaagagacatctattttaccatgtttattgcagcactattcacaatagccaaaatatggaatcaacctaggtgtctaacaacagatgaatggcacatgtacacaatggaatattattcagccataaaaaggaatgcagtcttgtcattcacagcaatataagtggaagtggaggacatgttaagtaaaataagccaagaacaggaagttaaatactgcatgttctcactcctatgcacaagctaaaaaattgttggtcttggtcttgtagaagtaaaagtagcacagaggacttgaggctggggaaggtagggggaaaggaaggatagggagggatttattaaatatacaacatgacagcaagatagtaggaataagttctagtgttctatacactgtaggatgactacagttaacaatacatggtttcaaatagctaggatagtaaatgttctcaggacaaagaaatgatgtatttgagatgatggatattctaattactcttatctaatcactctccattgtatgtatcaaaacatcaccatgtaccccacaaatatgtacaattatctgtgtcactaaaaaagtttaaaaattacatagagtttacatataatctatgcacatcctcccatatactttaaattgtttccagattacttgtaacacctagtacaatgtaaatgctatgtaaatagttgttataccattttttttttttttttgagacggagtctcactctgtcgcccaggctggagtgcagtggtgcaatctcggctcactgcaacctccgcctcctgggttcttgccattctcctgcctcagcctcccgagtagctgggactacaggcgcctgccagcacgcccagctaattttttgtatttttagtagagacgggttttcactgtgttagccaggatggtctccatctcctgaccttgtgatccgcccacctcggcctcccaaagtgctgggattacaggcgtgagccaccgcacccagctcttatactgtattttaaattttgtatttttttattgttgtattcttgatttttaaatttcttttcgactatttttgatctgcagttggttgaacctacagatgtcagacccatggatatagagggctgcatgcataatactatttattaacccaggttatagctgaagacactgagatttagagaggttaactaatgttcttaaagtatcataggtatacctttaaatgatagggctgggatatgacttagtgacttaggtatgtcaatggtaaaaggtggagttcagctccaatctcaggtttacctctctccaaatcccccataaatttattgttgcctcaccgtggcagcctgcagtagtctccagttgggttgcagcctgctgtgtctttggtttcgcctctgaagagctaaggctggaggtcaggtcagtgcccaactccaaggcactatgaggctgatttatgagggatggaaaattagacctgtggctccaggggagaagcctgaggagattcccagagggtagtcattccaaagggcactcaaaaggaggaaacaaggagaaacccagaagaacccatctgtccctcagagaggaccccaggagagggctgggtggaggtgacagtatccaaatttttttttttttttttttttttttgagacagagtctcactctgttgcctaggctggagtgcagtggtgcaatcttgatctcggctcactgcaacctccacctcttgggttcaagcaattctcctgcctcagcctcccgagtggctgggattacaggtgcctgccaccatgcccagctaatttttgtatttttagtaaagacagggtttcatcatgttggccaggctggtcttgaactcctgacctgaagtgatccacctgcctcagcctcccaaagtgctgggattacaggtgtgagccactgtgccaggccctgtactaacatttttttctctatggctcttggcatttttcacagagcaatcacttctgctaagggatttcccctcttttacagatgagccattagaggctcaggaagagcaagtgaggtttcagaacaagtcccatcccaggggcataaacaggcataatctgtatatcactgactaggatgacctggggctaagctgagggaaggggctcttgcaatttgaaggttaaatggacacttagggggtacccaaagtcaggaaagagctctggggtgacaataggagagcccagtggtcaagacatggatctgatttagggtctgtgtgtgtgtgtgtgtgtatgtgcatgcaagctgcggttggtgaggaatttacttctgggtggttcagaaattagggcagagagtgcagtgtgtactcagctgtgaaaaactgggaaccacagaggcaggggctggctcctccagggaggcatccagtttgtcctctggaatttggaaataggactaaaaaagctcctctttttctctttttttataccttctttggatcttctttttgtgatttcatttactctcctttgttggtttattagttgttcctctttgttgtcttatttcctcttggttgctttagggtttatagtacatatctttaacttaccacagtctatctacaagtactattaagtctttcacaaatagtgtgagatttttacaacacaacgtagctcttgtgtccattttgctttctcatttttatacagttactcattcctttatttttttcttcacatctttactgagcacttactttgtgctaggccatatgctggatgcatggatacaacaataagtaacatttgtgttccctgagtgagtctgcattctactgagtaggctagtaatgacaatcaatggtcaaaatacagcatgtaacagtatactcaacaaatgcatcccaaaatactatctgcttttaacatctaccaagtccaggaaggaccaatgccaggtcagttgaggtcatgtctactcttgagctattctccattcctgtgacttggtgaggtgaaaagccatcagttataaactagggagagaaagaaaagatagggaaaagattaagggacaaatctgactaactcccatttcccaccctgggcgtccaatttgaaggaggcacaggtggtgggggtggtgttggggcaacctctaatttcaatgtttggggcttttatagttaggtgggtgtggctatttgaatggttaatatgaggtggtctttgaaattaaaagtgacccaaggactttttaatattttttaaggaattaacaaagtcatattagaaacttcttgagattttgtccaaggagcagcacagatcatacctgaatggagaacaggcagaaaaagtaagctgttctggtgctccttttggagcatcgcttttccaaagcaatggtgtaagaagagctacagggccaggcacagtgactctcgtctgtaattctagcactttggtaatctgaggtggtaggattgcttgagatccaggagtttgaaagtaacctggacaatataatgggacactgtctctatagaaaataataaagaaaattagctgggtgtcgtggtgcacacttacagtcccagcttctcaggaagctgaggtgggaggattgcttgagcccaggagattgtggctgcagtgagccatgaacaagagattcaggagcatggtggatgaagatctgactgtgcctggtgtaggttgggagaggaatgagagaatgatgtattagggaaaatcaagcccagtaatgctttactgagttcaagtatgttaggttcttccagttttagcaagtgcataaaaatggaactgatatgtagatatctagagatatttgaaaggaaccaacttcaagttgaacaatctgtaatcgacattagcctttttccctttccttttttcagtcttcagatttttccaaagatttcttatgaatgtactgcagagaaatcccaaacccatgttcaaattcttccagtaagtgtaagtactttgtctaggcaagagatttgaattttactggcattgccagatgctctcttataatctcttaccatgatagggaaggggctttagttctttcagacatccttgttatgccttttctggttttaagctattttctcatgatatggggatacaaataaagtgggagatgagcaatttctttgttctttcttaatattactcacctgcccaagatctagagagcccttctgttttctttcccctttccttcattccaataacttattgaaaaccccattctggcccactcagactgcagccctccccacagcccttctgaggctgtcttggaggtgcaaggtcagagtatgaagtggggaccctgtacccaaagcttaggcagacaccctagtctagggcttgggctttcacaggcaagtatagagtcaaaaagaaatgagaaacggcctagatctcaataaatgtttggtggtggacaatcacagggataaaaagcctttgttcttccctggtccccacctgggatcataagatcagagaaccaagaactcagagactcaagaatgagagaatctaagaatcatttagaagaaaactttacaaagcaaacctgccagcattggatatgggaaggaaacgagaggagaaggcaaagattccttctccccacctataatgccatacaaagcacttttctagttttaagctgctatgtgaagtagcttactgtgtatgattactaagagaatttacaggtactgaaaacattttggggagccttcaaaccctgtgcccacctttgcccctacattactaaggtgaaagcctcccccaagccttctgcttgaccaagcattaacttcattactcaccaggacttacacagactgagagtagtaggaccagtctgctccaggcctgggtttcttgaatgcagttaaatccatcccattcctccctgtgggaagttgccagagctttctcccaggctctggcttagctcagcagggtcccaggggtagccagaatgtgaacacatcccctcaggcccttgtgggctggaggaacagcatgagcaggagcagggccttgagatgggcatattagggggccagtgatgaggggtcctgtttgggggaatagaaagatttttatctagcatttctctgtaattctttgctccttcaccctacattcttctgggtgacttcactctcttcatggctcccatctttacctgggcacctgtgactcacatgtttctacctacaggccagatgttgcccctgcatctcagagccatgtatccaatagcctgtcagtcaggggaacctcatgcctcaggggaacctcaaacatacatgccccaagctgaattcatgtcttcacaatggcatgttttctccctgttttctttttttcgaagtagtgtttatttttattttttaaataacagctttattgagatagagcccatgtaccataaaatttacccttttaaagtgctttttagtatactcacatggttttacaaccttcacaattaccttattttagaacattttcatcacccccaaaagaaactgtaacccattagcagtcattcctcagcctccccttctccaaaacctcagaaaccaccaattcactttctgtctccacaggtttgcttattctggacattcatataaacagaatcgtacaacagaatggaatcatttagcatgatgttttcaaggtccattcatgtaacatgtatcagtattttattccttgtcacagatgaataatattctatcatatggatataccacatactatttatccattcatcatttgatggacatttgggttgtttccacttttttactgttatgaataatgctgccatgaacattcatatacaagtttttatgtggacatgttttctttctctaaaaatttttaaatctatgttttaaatcgagaagtaaaagatgtatatatttatggatatatgttttcaattatttgggtatatacctaggagtgacatttctaggtcacatggtaactctatgtttaacattctgaaaaactgccaaactgttttccaacgtggctgcagcattttatatacccaccagaagcgtatgagagttctcatttctgcacatccttaccaacatttgttattgtctctttttaattttagccatcgtggtgaagtgatatctcattataattttaatttgcatttctctgatggctaccgatgttgagcatcctttcatatgctttctggccatttagcttctttagagaaactattcaaatcctttggccatttttcaattgggttatttgtccttttattgttaaggtgtaagtgttgttatattttctggatagtagacccttattggatataggatttgcaaatgttttatgccattctgtgcattatcttttcattttcttgctggtgtcctttgcagtactaaaatttttacttttgatgaagtccagtttatctatttttttctttttcttttgtgcttttgctgtcacatataaaaaactattggctaatttgaggtcacaaaaatttacttccatgttttcttctaaaagttttatagttttagctcttacgtctacaacctattttgagttagtttttgtatatgatgtgaggaaggggtccagctttattcttctgcgtgtggatatacagttgtccagcgtccgtttgttgaacaggctattctttccccatcaagctgttttggtaccctcatcattccctgtattctttaccttagtgatcttctatgctttatcttagggatgctgttactatctcttagtggggaaatctgcattctgcagagatttgtctcctccctttgctaggtcttttctaggctaaactagaaagtttgcttatatggtcctggagatggagggatgagatgcttgatttctcatgccttctgtcctgtctggccaatatttctgtggatgcctttttctctccaacctcactgttactgccctgttctgggtcacatcttttctagcctggctggcttagtgcctcttagtccatctgttccctctcctctcctcattcccaacccaaactcagctcaaactgagagaagacctattgaacattacttttcaaagtatctgctaactagttggatgaaacatggtattttattacatatctaaaactggttataattaatgttggccattgttaccatatgtgtctggtgggtcctttttctttctttttaaaaattagcagactgcttatcttttatctacttattagaaggcagcattgtatattctggcttaaatctcctctttggaattctgctgattccaaaataaaggccgactacttagcagagaatagacagtcctcttagctctggtttatgcctggctctctagcatcatttcctatatattagcaggcaagatagagatggaaagggagtgggagggggcctgggccagacatgctaatttcagagagtggctcgggtcctggaaaggaaggtggaatacttgggggtcttggattcagtaaccacacatagtgaagaagggagtctcagtgggtcctgagtcctgtgtgtggggcctatatcatgaggctgtggaggggagggctgcttccatggtacttagggcttggtcaaggcacagtggatgtggaacccggcttgtaggacctcacaggaacccaagcctgactgggagtgacacagttcttgacctgcttcagggtgggccaggggcttcccagtctgcacttagtggacacagctggacaaggtgaagcagtgggtatagagagaggctgactgcatcagcgtcccaggaccctctgccacatcagctttctttaggagccctagaagagcccaccctttctgatctccaaaaatgtgctttatattccacttccttaaatcttcatgttactagtcagagaagttgtaacttctatttatttatttttattgcggtaaaaaataacatgagattgggtcgtgcgcggtggctcatgcccaccgcgttatcccaaaggtgggattacgcctgtaatcccagcactttgggaggtagaggcaggcagatcacgaggtcaagagatagagaccatcctggccaacatggtgaaaccccgtctctactaaaaatacaaaaaaattagctgggcatggtggcatgcacctgtagtcccagctactcaggaggctgaggcaggagaatcacttgaactcaggtggcagaggttgcagtgagccgagattatgccactgcactccagcctggtgacagagcgagactccatctccaaaaaaaaaaaaaagagattaaccctcttaattaagtgtacagtaaagtattgtttactaaaagtacaatattttgtagcatatctctagaaccttttcatcttgcataactaaaactttatacccaactgaaaagcaactccccattttcccctctccctagtccctggcaactaccattctaccatctgtttctatgagtctgactaaaagatacttcatgtaagtggaatcatgcagcatttatttttctgtgactggcttatttcactcagcatagtgtcctcaagtgtcatctatgttgtagcatatgacaggattttcttttttaatgactgaatattctatttctatttctttttcttttttttggggatggagtcttgctctatcacccaggctggagtgcactggtgcgatcttggcttactgcaacctccacctcacaggttcaagagattctcttgcttcagcctcccgagtagctgggactataggtgtgtgcaccatgtctggctaatttctgtatttttagtagagacagggttttaccattttgggctggctggtcttgaactcttgacttcaggtgatccacccaccttggcctcccaaagtgttgggattataggtgtgagctactgtacctggcctgaatattctacttcttgatagaaaaaaacagactctgtaaaatatttgaagagggttatcctgagaacatgtgcccaaggtggttgggttgagcttggttttatacattttagggagacagatgttattggtggggggagcagttgtgtgggggttgccaggtcataggtggattcaaagatttcctgattggcaattggttgaaaaggttaagctttgcctaaagagttgaagtcagcagaaagaaatgcttgaattaaggggggttgtggaagccaaggttcttgttatgtagataaagcttctaagtaacaggcctcagagaggatagatggagcttctgaacagcaaaagaaactaccatcagagtgaacaggcaatctacaaaatgggagaaaattttcgcaacctactcatctgacaaagggctaatatccagaatctacaatgaactcaaacaaatttacaagaaaaaaacaaccccatcaaaaagtgggcaaaggatatgaacagacacttctcaaaagaagacatttatgcagccaaaagacacatgaaaaaatgctcatcatcactggccatcagagaaatgcaaatcaaaaccacaatgagataccatctcacaccagttagaatggcaatcattaaaaagtcatgaaacaacaggtgctggagaggatgtggagaagtaggaacacttttacactgttggtgggactgtaaactagttcaaccattgtggaagtcagtgtggcgattcctcagggatctagaactaaaaatgccatttgacccagccatcccattactgggtatatacccaaaggactataaatcatgctgctataaagacacatgcacacgtatgtttattgtggcactattcacaatagcaaagacttggaaccaacccaaatgtccaataatgatagactggatgaagaaaatgtggcacatatacaccatggaatactatgcagccataaaaaatgatgagttcatctcctttgtagggacatggatgaaattggaaatcatcattctcagtaaactatcgcaaggacaaaaaaccaaacaccacatgttctcactcgtagaagggaattgaacaatgagaacacatggacacaggaagggggccatcacactctggggactgttgtggggtggggggaggggggagggatagcattaggagatatacctaatgctaaatgacgagttaatgggtgcagcacaccagcatggcacatgtatacatatgtaactaacctgcacattgtgcacatgtaccctaaaacttaaagtttaataataataaaaaaagaaaaataaaaaaaatcaaagaaaatctaaaaaaaaaacaaaaaaaaccccaaaaaacaaaaaaacaaacaaaatacatctcttattggcctttaaaaggtgtcaggctctctggaaaatacctagtaaagggaagagatgactctctacagaacggagatttccccactaagagacagctttgcaaggtcacttcaaaatacgtcaaaggaaatatattttggggtaaaatactttgatttccttcagggcctaccatctgtcaagtgatgctataccagagtctggagttggatctacaaagagtagagtctatttgctacaaagagtctattttttcagtcttatgatctctattttaatgtgaatgctggtcagttgtacctaaactctaaagggagaagggtataaccaggcatgtctgatccccacttctcatcatggcctgaactagcttttcaggtttctttgggatccccttggtcaagagagggctccattcagtgagttgggggcttagatttttatttttgggtttacacattgcacatacatcatattttctttatctgttcatttattcatggacatttaggttctttccacctcttgctattgtgaataatgctgcaataaacatgagagtgcagatatctctctaatatcttgatttcaattcttttgggtaaatacccagatgtaggactgttggatgatatggtagctctatattaaatttgaggcttcgtaacttttaatgtttcctgctgtgccatgtatttttcctttgtccctccagatctacttgctatcttttccattctgctgtctgcctgtttcaggaagactgcatcagcacattaccttgcctgctggctttcagtggcttcagccaaatttcactccccactagagtaggaggttgggagaacactgaggtcagggagttggttcccctggctccctctctgccaggtcacagattccttgctgaagaccacatccctggttgggtgacgtttttctatcactactttttgggtttctgtgtctactctctccatttgaccctcagatcatggggtggtcctggctctttgctgtgcaaattcaagggtgctgccctgtccctcattggcttacttaatcccatctgtgtttataaatagtccctcattatactctccccaattatcctctttgagtgtcccgtctctgtccttctgggccctgacaatcagagatggtggacatatcctaaacccaatgaatggttataccttttctggctcaagtcgctattttctgtccatccttggtgcttggtgacacttctccaatccttgaagcagaggtcttctctgatcttatcatagtggtctttacttatcagcaaacatcagaggtaaacaatcagcctcatgggaagagggaggttgtttcttcccagggtagcctgtggcctctgctgtttcagttgtggtagttcttgaagcctgttatctgaagtcaccagcatttactttaaataaaacacaaactctctagcttagctccaaggcctttcaaaatgtgatgccagaccatctcttcaatacttgtgtctttctctacatctgttctactgtgttttacccaaacttatctattattcatgtagcaggcagaataatgacccacttcccctaaagatgcccatgttctacttccctgggaatatgaagaaagcggaggtcagagtcatgtgcttgctggcactgaagatgaagaaagatgggggaagaggacaccagacaaggaatctgggcagcctctggaagcagctaaaggcaaggaaacaggttctcccctaagtcctccagaaaggaatgcaaatcctgccgacaccttggttttagcccagtgaaacttactttggacttttgaccttcagaactgtatgataataaatttgtgttgttttaagctaccaagctggtaataatttgttacagtaacaacaggaaactaatatattccctaaatgctcatcccattctcaatataagccagtggttctcaatcttggtttacattagaatcacctaggaagccttaaaaaaataccaggacctggaccctgtctccaaagattctgatttccttaatgtctgaacattagtgtttttaaaaaagctacccaggaaactctaatataattggaaaccattgatctagacctttactcaatgctgtctcctctacaggaaatgattttctttctagcttgaagatttcaacttgggatgcccagtagaaactctagaggagtttttaaacagcaccattgtactgccaggactccattcctagaaagtctggttaaattggtctgaagtggggccaataattgattatttttttaactcttattttagtttcagggttacatgtgcaggtttgttatataggtaaattgtgtgtcatgggggtttggcatacagagtattttgtcacccagggaataagcatagtactcgataggtagtttttcagttctcgttctcctcccaccctccaccctcaagtaggacctgctgtctactgttgccatctttgtgtacaggagtacctgatgtttagctcctacttataagtgattacatgtggtatttagttttctgttcctgtgttactttggttaggataatggtctgtagctgcatccatgtttctggaaaggacattatttcattctttttttatggctgcatagtattccatggtatatatgtaccacattttctttatctagtataatgttgacgggcatctaggttgattctatgtctttactattgtgaatagtgctgcaatgaacatatgtatgtatgtgtctttatggtagaacaaatttttattcctttgggtatatacccaataatggggttgctgtactaaatggtagttataagttctttgagaaatctccaaactgctttccacagtggctgaactaatttacattcccaccagcagtgtataagtgttcccttttctgcagaagcttgccagcatctgttattttttaaattttattttattattttttgagacaaggtcttggtctgtcacccaggctagattgcagcctcaatctcctgggctcaatagagcctcccacctcagcctcctgaggtgctgggactacaggtgcacaccacactccctggtaatttttgtattttttgtagagaggaggttttgccatgttgcccaggctggtctcaaactcctgggctcaagcaatccacccactttggcctcccaaagtgctgggattataggtgtgagccactgtgcctggcctcttttggaactatcgttatgaagttttggaatagcagttatgctagtttcataatgaattcactcaatttcctaattaaatatcatgttctaggatagttttttatagcacaggaatttttcatcttttgaaagtttgggaagaacttactcataaaacctgggtccaggtgtctttcaggtaataattatttattaatgctttttgatttctttcttggtaattaatctactcaggtttttaatcttttcttaagtaaatttgaaaaattatatccttctggagatttgtctatttcataaagaattataaatttatcagcatagactcctacagggtgatttgcatttcaaccaggcaattaaataccttaacccaaataataaatctgtaatgctggtaatattttgagtcatgctccacctagctcatctcaaatcactctgtggtgtaaaaggcatttctttacagtatgtatgaaaataccatatacacactcactaaaatactcaagagacacacactccataaacacaccatcttctggagaagtggttctaccacagactgaatcccataacaaaaatattgcttctgtcctcactgctcagaccccactcttgctagtcatttgcctcactgacttatcaaaaactcagatgatgaagggttaggatctcagaaacataggccatcagaggaagaagattttatttttgtctgcacacaaggaatttaaggaagagaggaactgcaaatctgctggtagctgaaggtggtggtagccacgatccctacatgctcagcactagggcagatgggctcctcttcccatcctttttggggcctctaggacaatgtagaacatccagaatcacgaattcacaggaaccaagaacagcaacatattcacagccatatacagcagaggtctgtagaggtcaccttgctcggctcctgcctggatatgagctccctcaacttgcatgtctctagagatgagttgctcactactgtgtgttgaggccgtcagttttgtgagtgggtggctttacccagatgtctttccttactgagggctgaatctctcttcgtgtggtgtcatctccttggttctaggtctgtccccaagagcttcttggggttgttttaataggaaggagcagaggagaattaacatatttttgagggcctaccatttcttggccctgtgaagtactttcaccgctacaatttccccctcattcagcagccccaacccctctattattagacaggcattagaactgagcatcaggcacatgaggtcatcttttacccttccatttatttgttcattcaccatcgtttttgacatttgttatgtaccaggcagtctgccaggcactgaggcttaatgggctcactagatgtggtttctgtgcccaagttacttagagtccaatggagaagaaccagagtgctgtgggagcccagaggaggtctctaattcagcctccagagacaagccagtcttttaagaggaaaggatctctaatctgagaatcaacattcaagtcagccagggcaagtgcagtacaaagagctcaatgacatcaagctgagaattggtggggataggattagaactccaaagccaagtgccctttcactgtcacctcacctcaagggaggtatctgggcttgggtaagtcccataaacaaattatagaaagaaacaagatgggagagtgaaagtgagaggatgaactcacattcctgctcatttttcactgtggatgactcgggttcaaaaaggagggctagaggttaggcttaggaaaagattttctcccgagaagaccaggagctggggaggaagggaccctggtgtggactgggggtagtggtgggattgtccagagagagaggctaaccagcttgcggtgtgagtcaccctctttccttgggctttccctgcatatcccctactcctgccatcacctgcctagtaagagcctccaccctagtggccctcactgctctcctgggctgacctccagagctgatactcaccctagcaacatcaagcaggaacacagagaaccagtggggctccctaagtgtggttaaatgcacccctacttttccccaggggagcacaggctctgcctcagccaatgggcaatgaccttgagcaagagctggctgcctaactcagtctcctaggaagtgaacaggaccagcctggagtctggtctcctgacagccaggccaggcccttcctactggtctgtgttgcctaaggtatctgctctggagctgaagattcaacaaagacagagaattcacacctcataccctaaacctgcagcccaccccaggggcagctctgcccaaagcaggatcagggagtggactgtgggatctcagtcaatccagcaggtgggttctaaatatcggaaatgaggagccaagagttccaaggaagtgcaactttgactgagcacttactatgtgaggatttttgaaggatcagtggtacttctatgatgtttgtgggagaaggcggggagctggaagaaggagaatgaggctttgagagagcctgttgaagtgaggatgttatcatcccattttagaagtaggcatcgagggttagagaatttgggtgacttgttcaaggtcactcagcatatctgtggcaatgctgggatggtcatctgatccaaatctggctttctctactcacacctctgtctcacccctgctctaggccctggggaggaacagataggattcaatgatggcttcatggaggagaggacatttgggccaggcctggaaggtctggaagcagacacccaagcagaaaggaggagggcctggatggctgaggctgagctcaacatgtgggatacggactgtgatgccggcaggtgtggggctggtgaggtttgtcctgaagtcttggaagttggggagggcaggagccaaataagagtgtgaagtctggatccctggagatcctccaagggcaccggatgggtatgcttcagctttgtggctgaggtggcagcagggtggtcagagcggtccagcaggcaaccagggatggaggccccggaagaatgtggagcaccccagggactgctcacccctgggcccagctgtgaggtttgccaagaggagggatccctcatgctgggtgaggcctcaggtgaccctctgtgactccactctctcctcttccctgggcctggcctgtgcctttctcactgggctctgtggtcccctccagttctcccatgatcctccggtcagtaggggcctggccagggcacagacacccatgcaaaggtggcttctcacctcttggccctggcatggaccccactgctgccccagaatggtggtggctttcactggacacaccacttggtcacctcacaccaaggccaactcagacctccaagaattgtttgccttctcttcttaaggctctgtattagtttcctagggctgccatcacaaattgtcacaaagtgggtgcttaaatcaacagaaatgtcttatcccatggttctggtggctggaagtccaacattaaggtgttttcagggccacactccctccggaggctctagaggagaatccgcgcctggctgctcccaggttctggtgcctctggcattccttggattgcatccagtctccacctgcatcttcccatggcctcttttccatctctcatagggacatttgccattggatttagcgttcatctaggtaatctagggtgatctcatctgaagatccttaattacatctgcaaagacctttttctaagatagggcatgttcacagtctccaagggatgggacatggacatatctttgtgagagccacccctctgcctaccacagcctccaaatgtggattgtgaaggaatgagagagagagggaaaggggcagtgagggtggccttggccttggcaggttggtgtgcagagggccgtagtaggggtgggtgtgtgacaatcacaatgcgggaagcaagggtgctgctatcaggaagcctgtctggtctggtcatagcatccttgactccaatggttcagctcagaagggtgggaactcagctctgcctgtggggctgggctaagccagaaaggctccctggggtagatgagcttcaagtctttcctgaggaaagaccagctgaggggtgcagagagagcgtacaggctgaagagatgctactcaggccttttttcatgctaggagatcccagctgtgcctcttgtcaggtctagggcttttcagggcagggatgggcctcccccctcaactggggagaccctttcacagaggcaacgtctggggccagggtaaggttgtggctgcggagcacagaggggaggccccaaaggtcctcaccaggactccatggcagggacagccagggaagggagacatgaggcaggcacacatgtctcaagggcaatgtggccgccactagccctgctcccactgtcccatgcctcgtcaactcctcttttccatctcctgtcaagtgagtccaccccacgtaccaaggcaggttccaggacacgaccctgctcgcccctctccctcacaccctcatcttgttggacaccaaccctgcccatcccactgccaagctcctctcttgtctagctcctaaggcctttgtctcaggtcatctccaggcctcatgctgggccaggacccaccactccctccagcccctgtctaactctgcctccagaaggatctttcaagaaagcaaacctgaccttgtcaccctattaagaccctgcagaagctccccactgcccaccagataaagtgcaggctctctcactgggcattcaagtctctcatccgccacccctcccaggggtgcctctccagcaaggccaaactgcttgtactctgctgcccatccttctgtttgacctgtctttcctctcttagcttcacatgatactgcttgtgcttgctctaggacctcagatgccaccaactccaggaaggcctccctgagtgctcttgcccgctccaagtagctgcagcatgaggagtatcttgagtttgggactcacactgcatcccactgtggaggacactctgggcagcccagctggcctgcaactgccttagcagtccctacccccagcccagcactatggggcagaccacttgtctactgtctctccttcccttctccttcctggcccccatggcatccctgccctaacttctcctcctcagatttttctttctgtatcaagatggtcaggggcctcatattctctgtcccttctttatgtcagaacctgctctccagtgggatctgaagctccttcacacttatgcacaaaagcctgataatggctgtagttgactcctggaggaacagtggtggttattttggcacatggagtgggtggggaggttttttgggcacaggaatcttcttatcttcttgaagtccctgaaatctgtcttgggtgcatcatctattctttattttttaattaaaaatttttaattgaaggctgggtgtggtggctcatgcctgtaatcccaacactgtgggaggctgaggcgggcagatcacctaaggtcaggagttcaagatcagcctggccgacatggcgaaacagcgtctctactaaaaatacaaaaattagctggatgtggtggcgcacatctgtaattccagatactcaggaggatgaggcaggagaattgcttgaactttggaggcagaggtttcagtgagccaagatcgcaccactgcactccagcctgggtgacagaatgagtcttcgtctcaaaaaacaatttttttaattgatacataatatttgcatatatttatggggtacacatggtattttgttacatgcatagaatgtgtaacgatcaagtcagggtatttggggtatccattatcttgagaatttataattttcatatgttggaaacatttcaagtccttttttctagtaattttgatatatacaatacattgttgccaactataatcactcttgtttgctatggaactaatttcttctgtctaactgtatgtttatacccaataaccaccctctctttatctcactgccctgcacttaccagcctctggtaactgtcattctactctctactttcatgagattaacttttttagctgtcatgtatgagtgagaacatatgatatttgcctttctatgcctggcttattttacttaacttaatgaccttcagttccatccatgttgccacaaaagacatgatctcattcttttttatggctgaatactattctgctgtgtatatatacacaccacattttctttatccaatcattcattgatggacacttaggttgaatctatagttttccttctgtgaatagtgctgcaataaacatgcaagggcaggtatcttttttgatgtgacttcttttcctttgggtagatactcagtagtgtgacagatagactaaatggtgttcttatttttagttctttgagaaatctccatactgttttccatagaggttgtactaacttacatcctcaccaacagtgtatgagttctctttcctccacattctcaccaacatctgtttttttaaaaatcttttttatgatagccattctgagtggtgtaacatgatctcttgtggctttaatttgcatttcttggatgattagcgatgttgaggattttttcatatgtctattggccatttgtatttctttttttttttaaaatgtttactgatgttctttgcccactttttaaaaaaattattatactttaagttttagggtacatgtgcacattgtgcaggttagttacatatgtatacatgtgccatgctggtgcgctgcacccactaactcgtcatctagcattaggtatatctcccaatgctatccctcccctctccccccaccccacaacagtccccagagtgtgatattccccttcctgtgtccatgtgctctcattgttcaattcctacctatgagtgagaatatgtggtgtttggttttttgttcttgtgatagtttactgagaatgatgatttccaatttcatccatgtccctgcaaaggacatgagctcatcattttttatggctgcatagtattccatggtgtatatgtgccacattttcttaatccagtctatcattgttggacatttgggttggttccaagtctttgctatcgtgaataatgccacaataaacatacgtgtgcatgtgtctttatagcagcatgatttatagtcctttgggttatacccagtaatgggatggctgggtcaaatggtatttccagttctagatccctgaggaatcgccacactgacttccacaatggttgaactagtttacagtcccaccaacagtgtaaaagtgttcctatttctccacatcctctccagcacctgttgtttcctgactttttaatgattgccattctaactggtgtgagatggtatctcattgtggttttgatttgcatttctctgctggccagtgatgatgagcattttttcatgtgttttttggctgcataaatgtcttcttttgagaagtgtctgttcatgtcctttgcccactttttgatggggttgtttgtttttttcttgtaaatttgtttgagttcattgtagattctggatattagccctttgtcagatgagcaggttgcgaaaattttctcccattttgtaggttgcctgttcactctgatggtagtttcttttgctgtgcagaagctctttagtttaattagatcccatttgtctattttggcttttgttgccattgcttttggtgttttagacatgaagtccttgcccatgcctatgtcctgaatgataatgcctaggttttcttctagggtttttatggttttaggtctaatgtttaagtctttaatccatcttgaattgatttttgtataaggtgtaaggaagggatccagtttcagctttctacatatggctagccagttttcccagcaccatttattaaatagggaatcctttccccattgcttgtttttctcaggtttgtcaaagatcagatagttgtagatatgtggcgttatttctgagggctctgttctgttccattgatctatatctctgttttggtaccagtaccatgctgttttggttactgtagccttgtagtatagtttgaagtcaggtagtgtgatgcctccagctttgttcttttggcttaggattgacttggtgatgcaggctcttttttgattccatatgaactttaaagtagtttttttccaattctgtgaagaaagtcattggtagcttgatggggatggcattgaatctgtaaattaccttgggcagtatggccattttcacgatattgattcttcctacccacgagcatggaatgttcttccatttgtttgtgtcctcttttatttccttgagcagtggtttgtagttctccttgaagaggtccttcacatcccttgtaagttggattcctaggtattttattctctttgaagctattgtgaatgggagttcactcatgatttggctctctgtttgtctgttgttggtgtataagaatgcttgtgatttttgtacattgattttgtatcctgagactttgctgaagttgcttatcagcttaaggagattttgggctgagacaatggggttttctagatatacaatcatgtcgtctgcaaacagggacaatttgacttcctcttttcctaattgaataccctttatttccttctcctgcctaattgccctggccagaacttccaacactatgttgaataggagtggtgagagagggcatccctgtcttgtgccagttttcaaagggaatgcttccagtttttgcccattcagtatgatattggctgtgcgtttgtcatagatagctcttattattttgaaatacgtcccatcaatacctaatttattgagagtttttagcatgaagtgttgttgaattttgtcaaaggctttttctgcatctattgagataatcatgtggtttttgtctttggctctgtttatatgctggattacatttattgatttgtgtatattgaaccagccttgcatcccagggatgaagcccacttgatcatggtggataagctttttgatgtgctgctggattcgttttgccagtattttattgaggatttttgtatcaatgttcatcaaggatattggtctgaaattctctttttctgttgtgtctctgcctggctttggtatcagaatgatgctggcctcataaaatgagttagggaggattccctctttttctattgattggaatagtttcagaaggaatggtaccagttcctccttgtacctgtggtagaattcggctgtgaatccatctggtcctggactctttttggttggtaagctattgattattgccacaatttcagctcctgttattggtctattcagagattcaacttcttcctggtttagtcttgggagagtgtatatgtcgaggaatttatccatttcttctagattttctagttgatttgcgtagaggtgtttgtagtattctctgatggtagtttgtatttctgtgggatcggtggtgatatcccctttatcattttttattgcgtctatttgattcttctctttttttctttattagtcttgctagcggtctatcaattttgttgatcctttcaaaaaaccagctcctggattcattaattttttgaagagttttttgtgtctctatttccttcagttctgctctgattttagttatttcttgacttctgctagcttttgaatgtgtttgctcttgctttcctagttcctttaattgtgatgttagggtgtcaattttggatctttcctgctttctcttgtgggcatttagtgctataaatttccctttacacactgctttgaatgcgtcccagagattctggtatgttgggtctttgttctcgttggtttcaaagaacatctttatttctgccttcatttcattatgtacccagtagtcattcaggagcaggttgttcagtttccatgtagttgagcggttttgagtgagattcttaatcctgagttctagtttgattgcactgtggtctgagagacagtttgttataatttctgttcttttacatttgctgaggagagctttacttccaagtatgtggtcaattttggaataggtgtggtgtggtgctgaaaaaaatgtatattctgttgatttggggtggagagttctgtagatgtctattaggtccacttggtgcagagctgagttcaattcctgggtatccttgttgactttctgtcttgttgatctgtctaatgttgacagtggggtgttaaagtctcccgttattaatgtgtgggagtctaagtctctttgtaggtcactcaggacttgctttatgaatctgggtgctcctgtattaggtgcatatatatttaggatagttagctcttcttgttgaattgatccctttaccattatgtaatggccttctttgtctcttttgatctttgttggtttaaagtctgttttatcagagactaggattgcaacccatgcctttttttgttttccatttgcttggtagatcttcctccatccttttattttgagcctatgtgtgtctctgcacttgagatgggtttcctgaatacagcacactgatgggtcttgactctttatccaatttgccagtctgtgtcttttaattggagcatttagtccatttacatttaaagttaatattgttatgtgtgaatttgatcctgtcattatgatgttagctggttattttgctcattagttgatgcagtttcttcctagtctcgatggtctttacattttggcatgattttgcagcagctggtactggttgttcctttccatatttagtgcttccttcaggagctcttgtagggcaggcctggtggtgacaaaatctctcagcatttgcttgtctgtaaagtattttatttctccttcgcttatgaagcttagtttggctggatatgaaattctgggttgaaaattcttttctttaagaatgttgaatattggcccccactctcttctggcttgtagggtttctgccgagagatccgctgttagtctgatgggcttccctttgagggtaacccgacctttctctctggctgcccttaacattttttccttcatttcaactttggtgaatctgacaattatgtgtcttggagttgctcttctcgaggagtatctttgtggcgttctctgtatttcctgaatctgaacgttggcctgccttgctagattggggaagttctcctggataatatcctgcagagtgttttccaagttggttccattctccccatcactttcaggtacaccaatcagacgtagatttggtcttttcacatcgtcccatatttcttggaggctttgctcatttctttttattcttttttctctaaacttcccttctcgcttcatttcattcatttcatcttccatcgctgataccctttcttccagttgattgcatcggctcctgaggcttctgcagtcttcacgtagttctcgagccttggttttcagctccatcagctcctttaagcacttctctgtattggttattctagttatacattcttctaaatttttttcaaagttttcaacttctttgcctttggtttgaatgtcctcccgtagctcagagtaatttgatcgtctgaagccttcttctctcagctcatcaaagtcattctccatccagctttgttccgttgctggtgaggaactgcgttcctttggaggaggagaggtgctctgcttttcagagtttccagtttttctgttctgttttttccccatctttgtggttttatctacttttggtctttgatgatggtgatgtacagatgggtttttgctgtggatgtcctttctgtttgttagttttccttctaacagacaggaccctcagctgcaggtctgttggaataccctgccgtgtgaggtgtcagtgtgcccctgctggggggtgcctcccagttaggctgctcgggagtcaggggtcagggacccacttgaggaggcagtctgcccgttctcagatctccagctgcgtgctgggagaaccactgctctcttcaaagctgtcagacaggaacatttaagtctgcagaagtaactgctgtctttttgtttgtctgtgccctgcccccagaggtggagcctacagaggcaggcaggcctccttgagctatggtgggctccacccagttccagcttccaggctgctttgtttacctaatcaagcctgggtaatggcaggcgccccgcccccagcctcgctgccgccttgcagtttgatctcagactgctgtgctagcaatcagcgagactccgtgggtgtaggaccctccgagccaggtgtgggatataatctggtggtgcgccgttttttaagcccgtcggaaaaacggagtattcgggtgggagtgacccgattttccaggtgctgtccgtcacccctttctttgactgggaaagggaactaactccctgaccccttgcgcttcccaagtgaggcaatgcctcaccctgcttcggctcgcgcacggtgcgcgcacccactgacctgcgcccactgtctggcactccctagtgagatgaacccggtacctcagatggaaatgcggaaatcacccgtcttctgcgtcgctcacgctgggagctgtagacgggagctgttcctattcggccatcttggctcctccccactttgcccacttttaaatgaggttatttgttttcttactgctgagctgtttgaattccttggatattctcgggatattagttctttgttggatgaataatttgtaaatattttatcccaatcaggaggtcgtctcttcactttattgattgtttccttcgctgcacagaaactttttagtttaatatagtcccatttgtctagttttgtttttgttgcctatgcttttgatgtcttagccataaaatctttgcctacaccaaagtcctaaagtgtttccctgtgctttatgctttcttctattggttttataattttgggtgttacgtttaagtctttaatccatcctgagttgattttttgtatagtgagaaatagggtctagtttcattctttcacatatggatatccaactttcccagcactgtttattcaagagactgtccttcaatgtatattcttggcacttttgttggaaatcattggctgtaaacacatgcatgtatttctggattctctattctgttttattgttctatgtgtctgtttttattccaatagcatgctgctttggttaatatagctttgtgatatattctgaagtcagctagtgtgaaactttcggctttgttgtttttgctcaggattgctttggctatttaggctcctttttggttccagaatagttttagtgttgttttttctatttctgtcaaaactgacattggtattttgatagtgattgccttgaatctgtggtttttttgggcagtgtggtcatcttttttttttttttttttttttttttttagatggagtctcactcccgttgctcaggctggagtgcagtggcacaatcttggctcactgcaacctccacctctcaggttcaagcgattctccttcctcagcctcctgagtagctgggattacaggtgtgtgccaccatgcctggctaactttgtatttttaatagagatggggtttcaccatgttggccaggctggtcttgaactcctgacctcaggtgatccacctgcctcggcttcccaaagtgttaggattacaggtgtgagccaccgtgcccggccagtatagtcatcttaaggacatcaattattttgatttaagaacataggctctctttccatttgtttgtgtcctctttaatttatttcatcagtgttttgtagttttccttgttttttgcctcacgattaaatttattcctaggtattttattttatttttaaaagcttgttttcttttttaattggcatataataatagtacatatttatggaatcccaagttatgttttgatacatacagtgtagactttttcttccactaattttggttttggttttctcttgcttttctcattccttgaggtgcattgttagattatttgaattctttccacttttttgatgtaggcatttattgctataaactaccatttagcactgcttttgctgtatcccatagattttggtatgttgtgttttgattttcatttgtttcaagaaattttttgatttccttttaaatttcttttttgatccaatggccattcagggacatgttgtttaatttccatatatttgtgcagtttccaacattcctcttgttattaacttctggttttattttattgtggtctgagaaggtacttcatatgattttgatatttaaaaatttgtggagacttgttttgtgtgctaacatatggtttatcctggagcatgttccatatgctgatgagaagaatgtgtgttttgtagctgttggatgaaatgtcctgtaaatttttgttaggtatatttggtataatgtgcagttttaattcaatgtttctttgttaattttctgtctagatcaggggtgtccaatttcttggcttccctaaggcacattggaaaaagaattgtcttgagccacacataaaatacagtaacactaacgaatagctgatgagcttaaaataaattgcaaaagctctcattatgttttaagaaagtttatgaatttgtgttgagctgcattcaaagccatcctgggctgcatgtggcctgcaggccataggttgaacaagcttggtctagataatctgtttaatgctgagagtggggtgttgaagttcacaactcttattgtactggagtctacttctttctttacatctaataatatttgctttatatatctgggtgctctgatgttgggtgcatatatgtttagaattgttatattcttttgccaaattgatccctttatcattatataatgattgtctttatctctttttattgtttttgacttaaagtctgtcttatctcttatatgtacagctattcctgcttgcctttggttttcatttgcatggacttttttcatccctttagtttaaatctatatgtgtctttatacataaggtgagtttcttttaggaagcatatagttgggtcatgttttttaattcatttagccagtctttgtcttttatttggaaagtttaatctgtttgtattcaaggttattattgatacatgattttattaaataatttctggtggctgcattgggcttgggaggccagtccctaggcacatagtgcgtacgtatgtgtgggtgtcagctgtggtggtagaggcaggttgggtgggcctgatctcaggccctgggaaagtgtttgggtgccaaaggtgatgaactgggttgggtgattcccatacccaaagatgacatgcttaggcactgggaaggaggagtggagccaggcctggctccttaggccccttagtagtgtgtgtaggcactggctgtgttaggcagaggcaggtgatccctaggctcctggtggtatgttggggtggaggtgtcactgccaccctgctactggggagcacagggttgctttcagtggcagcagcagtaggcagggagctggggagcatgcactttgcttgtgctttggcagcagtaggcagggagctggggagcatgcactttgcttgtgctttggcagcagtaggcagggagctggggagcatgcactttgcttgtgctttggcagcagtaggcagggagctggggagcatgcactttgcttgtgctttggcagtggcagtggctgtggggcaggggagtctgtcctcagggcttgtgaaatgcatagtaactgctgctgggggcactggaatccgtgccaatggcttctgttttgaccctgggatcatccagcagctgcagaggctgtaggttgggtagcctttcctcaggccatatgaaatgtactgtcacccctctgttgggggtggggggtggagttgcaagctgatgctctcagtcaaccccttcctctgctaaccattggtttgcaggctgcataatccactctaactttgggcaggacttctaagagcttctaatctgtaactcctttttgtacaccaaccccaaccacccagccttgggaaactgagtgtacaaggcctcagcctgggtacaccgaaaggaagcagagaggagaagcgagtcaagaagcttgagatctgacacaggttctggcaagtgcccttgggccagggactcttatttcctcttccatagaaggtagatgttggactggtggcttctcatggcctttcccttcctgcatcaaacttgtgatgtttctagtgaattttgtatgattgtagtttgggaagctctttcatgttccccaattgacttgatttttcgaacacttgggaggtaggtggtaccaacccactttacagatgagggaactgagctttggagtgagcaatctcatagccagttggtaacagaaccaggtctggagttggccccctgactcctatctcctgagttcaccctgattgctgggagctggaggagcttttggcactgggggcagattgttttctccaaatgaggcaggcatgggaccaggacaagccaggtctcctctcctcttgcccaccctactcactcaggctaatacctcctatcctgctgtatctagtcttaaaaatgggtctctgtcccctcagggggatcctctggcctctccaaccttagctgctcttctaggaaagtgggccaaagaaaatttctggtttggtttgcatgtgtcccccaaagttcatgtattggcaacttaatctccaatgaaacaatgttgagaggtgggacctttaagaggtgattatgtaatgaatggattactctgccctcatgaatggattaatgccattatcacaggaatggattcctgatacaatgatgagtttggtcccctttcccttcctctctcatgctctcttgtccctccacttctgctgcaggatgacacagcaagaaggccctcaccagatgctgagcagatgccggcaccatgcctgtggacttcccagcctccagaactgtgagccaaataaatttctttatacatttcccagtctcaggtattctgttagcggcacaaaacagtaaataccttccatgaggcggcaggcaagtaggcccctggcccagatgaggaggcttccttttctcagtggggtagctctcaaatctcccatgcagggtgggggcgaattcctccagacaagcttcagggccttggccttgcctcagttaggggaaggggcctgattagaggtctttcagtgagaggtgatgagcggagccaggctggcccctgacccctgcctgtagccaggttgcctccctgcaccaggcaccttctcctccttagcagactcacctggggatccattctttaagccccaaaggagaaaagtcagggccctgaggaagaggggcaccaactgcctgattctgaagagtctgccctgatctgcctgagcctggggtctgactttgggaagtttgggcatcaggtccctgttatgagttgtggctggagggcttcagcctcctctagtctccttcagttggccccacctctggcaggccaggggctacagggaaggaagagcccatttaatcagctcctgccctggccaggtccctcatttggggtgttatatgccatatcttgtttaaacctcgcaaccccttgcaaggtagcgaatatcaagcccatgttacagatgaagaaactgaggctcagagaggtcgtccttagtcaaggctcagtactagtaagtggcaggtttgggacttgaaataaagcgtggttctgttccctacacttttttttcctgtaagatgcttggcctgggcacaggtgggtggtagtcccttgacccctgcaggactgtgacatgggaagggacactctattctgagtccatgggggcagggatcatcaggttgaatgaatgcgtgactgaattaaagcacttgctgtgctgtttaattttaagagagaaggggccttactgagaatccactggcctgacagtctgaaggccttggcgtggagcccaccctccatggccttgctgtgtgatcttggtcagggcctgcctctttatgggtctaatgtacaggaaggagaggtggaaactatttgctagatgggccttcaggctgggcatcctagccttaagaaactaggctgcagacccaatgacctcaggctgtaggcagtgggaaatctggcaagaggcatgatacggctcctgcgtgtgtgttgtgtgggaggggcagacgagaggccctcagggttcggcgccccagaaagccaggaggcctcaggcccctggtggacacagaagcaacccagctgtataaccctagcccctctcccacccatacacaaattattgggttccaggggctttttggtctttgaatgaagcttttggagaagtctgtccttctctatccatgactaggctggggccctgcacaggatctgtggactggtggctctctggcctctcctggttatgggactggcccagcagcttcaggctgcttggtctggccaggttcagcctgcactgcccagagccacaaggtggcacccaagcaccacatgtgtccaaggccacccgggctcatgtcttgctggagggactgtgcctgaggaaggtgcagcctgtgcctgtgggtaggtagtttgaggtacctcatcctcagacatcactggtgcacccctctgccccagccataggactgtctgtggggccatgctggtgtcagggcctgaggcaggagacctgggatctggttctggccctgtgtggtcctggcaagttgcttcctgtctttgagcctcagagtgctcttctgaaaaatgggcataaaaatagcactgacatcttcgttcattgattcactcagtcagcacatgtttattgagcacttactaggctagggtgtaacatacagctccaaacaagtgaagcctcgcagcggtgttcagaggattagatgaagtgatacctataatttatttagcacaattactaacatacattatggactctatataaatattagctaaaaccttatgtctaatttttgtggttagtcctatgattatccctattttagggaagaggaaacagggaaaggtattgcccatggccacacagccaggaagtagcagagctgggattgaatctgggctgcctgactctaaaccccactctgctggttcccacatttaatctggggctgtgtgtggctcctctgagctccctttaatattctccagaggaccttggatcaacttgggtcacttcctcaggccttccccatctgaatgctcagcctcctcctcccccagagtccccgactcctgcaggtttggtcctggcagggactggctgggaaagtcagtggtcatcaagaagccaacagtgattcagggccgtaagaaggtcccaggcccagctccctcctgctaccacctggggttgagacccgctaggaaatggaggccagagccacctggccctggtcccatcccgaatgtccatcacacttagctgggaccactgagctcaggcctttcctaagggtctgtgagggggagaggggggagcattcgaggatttctctctcagagagaatgtgggcccccatctgattgaaagggagttgtgggacgcatcttgaagttgagtttccatagcaagctctctgtttctgctgaggcacaactgggctcctcagagcctcaacgatgctctcaacctgtcagggggtgccctagccgtatcctccactcctcccagcccatcctgggacactaggtgggacttagtcacagccggggccgaaaactatatgcctgaagacgggctcaggtgggtgaatggcctctgtgaactgcagtgggactgggggcccatcatcatattgacaaccagacatctctgcaccttcaggcatgcagtgctcggccctggctgtgactaagtcccacctagtgtcccaggatgggctgggaggagtagaggatagggctagggcaccccctgccaggttgagagcatcgtcgaggctctggggagcccagttgtgcctcagaccgccaggctgcagctgagggttgtaccagccccagcggtgacagcagcgtatccatggtgtgcctgggcaacctggagaaagctctgtgccccccaagggctggaaaagtttcggccaccgtggagaaagctgtgggccgcatgggaaaaagttgtagctcctcaaacttttctcactgtgagcttatggctctctgtccctgaggtcagctgagtgatttgccaacaattaggccataatgagctggacctcagtggcctgggagtctcccaggggtacttgggctcaacaggacacctggggcccagttacagcagcctgagctgatgccaggtccagctgcgacctgagccccaaggatatgggcctgccccatgtgaccactttgcttgcatggccaaacttttaatgagtgaaaatggctacttctcttacttgctggtagcccaggcatgccacctgggtcctgcctgctcactccttaaagaaccagcaatttctaaaatatgacttgctgcagtttaagtgatcagctaatcaacaggttatgtggggtctagacgctgccccactgtgtgaccctggactgagccccaggcctctctcagtcttagttttcagcgataataatcacaggcttggcgtgaggcccagatgaaaataacacaaactgtaaagtgatggttcctttcaaatgatcattattgtccttaattattgcatcatattagcctggccaggaccttgactctgaccctcactcctggtgaatgagagccagctctgacctgggtgctcagaggcagctgcgtggcccctcctggctctgctggccactggcctgccctctgctccaggctgggctggcctagcaaccacactgtttataggtctctcttggctcaactatcttttttttctcctgctctgttaacaccctaggcctgcagacgggcaccactgagagtgttaagagccctgatattatcaagtccagtccttactgcatagatgggaaacaaaagcccagggagaagcagggtctgagctggaactccttcctttcccggggcttagtcacaagaaggcttcatgcgtatgcagtactttagtgtcgtctggccttctcggcagccctgtgagggtaggtaggctggcacccatctgtccactcacttactaagcttgcagattctaaagccagactgactgggtggacattctgtctccactatttactaggcatgtctctgtgcctcagtttcctcaaatgggaaaacactagtaattacatcatatgattgttgtgttaaatgagttagaatctatatgaaatgtatagaacatggcctagtgcaggctctcaataattaatatcagctatccttctggttatgattcagtcattcagtcagcaaacatttattgagctcctactgtgtgctgagcttggtagtgctagaacctggggatatagcagtgaagaagactgatttttggaactcagttttgtgaaggtgagggagacagacacatgaagccataatttcaagaccaaggatttggcaggctgaggtggggtataagcaggggaatacagtggaggggccttgatcccttctagggggagggaggcacagtcagggaagtcttctcagaggaggcagaagcagaagtaggcattgggccctgtgcaaagtgctttatatccaggatgttagtctatcctcacacaaacctgtgaggtagatgaggcgctctttttactgaagaggaaactgatggttatttgtctaaggtcactcagccagtaaattattaggtcagggtccaatccagggttgtctaaccccaaattttgtcccttttctttttctatgagggtgtttgtggcggtggttatgatggacagatgggggaggaggtcctacgcagacaggaggcactcacaggaaattctggctttgctgatgagggtgcaaacctggggtttcctttccgtggctggtacagaggcaggataccacagtgggtaccaggacaggccctgcccctggctgcctgggttccaactcacttactattagtgtggtctagagcaagtcacttaactgctctgtgcctcagtttcctcctctgtgcaatggggataatgataatggcaagcacttgcgtagcacttgtaagggctttcttttaaggattttacatctattactcataggatcctcagattctgtgtcttttttcctcagatggccataatacctgggtagctttaaggaataaattagttaatatacggaaggcacttagaacagtgcttggcacataggcaacgctcagtaaatgttagttattcttattcagcaccacagagtggagtcccaggaggctacagacagaattcctaaaaataatgaagatgattatgataacactagcaacaataaaacatgccctcatagttttacagcactttttaggatacaaagactcccacagctattgtttcatctgagactgaggagacaagtgtgtctaaaagtgtacacagaaaacactttttaaaaagacattcttattagcatcctgtgggatgtcttttttaaaagtgttctctgttcaaataagtttggaaaacactgaatcaaaccaagttaaacacttttcttcttggagagactcaagctcactaaacgttgtcagaccccacaaaagcagagggaagtacaacatgcagtgtttccccaaattattgggccatgaaatcctttgttctgaggagttgtgactcctggaagacactttctcaaacactggggtaggccgggcgtggtggctcatgcctataattctagtgctttgggaggctaagtgggaggatcacttgagaccaggactttgagaccagcctgggcaacatagagagaccctgtctgtaccaaaaataattaaaaaagagaaaacactggggtaaagagctttggctttgtcactggctgtgtgccttcaggtcaagtcatatgaatctaggcctcagttttcccatatgtaaaatgggaataaacgtacactcatgatggggccatcagtgttgtaagaactaaatgaggtcactggagtaacgtacacagcctaattcctggcaaatggacaataaacgttagattattatcgccgtgacacccctatgaaataacaccattattttccccacccagatggggagctcagtaggtagctccggggcccttcactttagtgtgtcagtggagcaccctcacatcccaggctgggcgccagagggcgactggctctttcccttccctccccattcccttttaaagatggatgaggcctcggttcaatgagggccccaggcaggggacggccacacccaggtttttggaggggccggggagggcgcgttcggggatggcactgggagtgggcagggctgacgcccctttgcccccagcccggtcttcctctacggcgacttcgccgcggggcagtgcggggaggcgctcagtgtagagctcgtgggggcctccgctgacagcggggcagggactgggagaagggcggcggcggagcaggtcgcgggctggtgcggggcctgggggcactgccgagcctacactgcggcggccgcggcggcggcggcagcgcgacaagttgccatggcccggctgccgcagctgccctcccaagggtctcgttagctctgcttggccggccaccgccgactcggccctagggaccccggcgacctagcaaacagccgatccgccgggcgctgacgaggctcgggggaagagggcggcagtccagatggcgcgcaagtgagtgccaggccgcgaggatttgccgccgggacccagggcgcactagctaggtgcgccgcccacccgcggcctcacgggggcgcccgagtccactgaatgagcccggcggggccgacagcagcagtcgagcgcgggtgcgccactctgaccgccgctcgctggtctcattgccggggcctgagcgggggctggggtgggtgccaacgaggaaagcacagttgatctgcaagttagtgggcggggagccagtagggagggactgcggagccgcgctggtcctgattcttcctcactcagctattttaatagcaatgaaatcttgaaggagtgctctgaggctgatagagctgtaggaaaaggtcttgggcgttcagatttttggatgcttcgtatttttcaactttattatctggcaacagtctttaaaactcaatgaccaattccagttctagccttaaacccaattaatccttaactatgaaagcagcatcctaaagtctactttcacttgttagcggcatctgtggaagtagccgagggtctcaggcagtgcagtagctctctgaatagcctctctttcctgagaaagggagcctcagctgctgtgcccaccaggcctggtgggagcgtgcgctcactgcgtaatagagcagggctgtgcttgtgaggtccctttggcccaaactgtgcaggatctgctgcctgcctttcctttttgttgtatcgttattgctttggcccagaaagctctgatgctacctgcctgcaaatagctcatctttactcaatacccgggtcctcacccctttatactgtgccccctctggactgtgatgcctgatgcttgtgtggtcagattgcattgacaagagatctcttccttgtcttataagggcactaatcccatcaggagggtcccaccctcttgacctagtctaaacctaattacctcccaaaggccccacctcctaatacctcattgggggttctggcttcagcataggaatttgggggggcacagaagactttaatccacaagagatgggttcctgacagtagtaaccactccccatccacccctgagtgctggtagtcagggtcacgttagactggagtggtatagagaagacttcaccactctgtagaaaaaggcaagaagtcttaactgaaagggaagtttctggtccctttttcaaaattacctccctggctctttaaaatgctgtattttataaaatgttttcgatttccctttcagatgtgcaggccaacctcaaggtgtgggttgcttagattacaaaggaacttgaattctttcatgtttttgtttaaagtatcactatcatcatctaaagccaagattggctgctttgaggaccttttctgaaccgtgtactaggataataactctgaaggagactgttcttggaaaaggctgatgttgggaccttgctagccattttggaattagggaatgaggtgtattggcatgagcagcagcacttttgtggctgtcaggcagagattttcttttcttttttcctttataagtcacccaacccaaattgttatcaggcagatatttttataggggtagtgggaggcagttcccaagtcccctgtccctctctgcacctagtctaccctctaagattgcaaccatcatagcatcttcttacacattacaatgcagtaaacttgggcacattgagcaccagtcatggccgctgtgttcctgaaggtacagaagtggcactggggccaggctgctgtctggaaaatgttagccactttggtggtactgcccttccgacaccgcctcctcacctcccccacccctacacacaaaaaacaagacaagtagagcaaacaaaccacttctccaggtagacagacctgcaggtctgctcatggtgaccctctctttagcctgcattgtttccaaggccttcagctggcctattgtttgctaagggcccacaccttggcaggagctgaaaagagaggatttccttttgctcaggggaggagggtctgtcctgggtttgcagagataggcttcttgtctatgctgctgaagaaaacaaactagacaggagtcagatgtgggctctaccttcttgctcagtctctaattcactgtggccttgggcagatcagttctccatccttattagtatcttgggtggaatactccttaaggaatctttcaagtattgagtgcccccatgcccccaccaccttccacaaccaggcctaggtgaggcaggaaggaagaaaagaaagtctgggtgcagagtgtgtagtatgcctcacagtacagcctgcaggaaggccttggataagaaaggctgagtgatattccagggggtgggacagaacagagtgtggtttgggtgggaagatgacctggtgaacctcaggttctctcaaggctttacagaggtgggagcagggccatgggtaggctggctacagtatccctgctgaaagggaatacttgttggtacaaactcagctcttggggcaaggatcatatgaacttgcggtcatgaaagtgtaagtagggtagaaatatgaggaagggagaggcacttggtcatggccaaggctggagtgtcattaatgtgtgggggttgaggaagcaggtcacaggattgttggatggctcattctacagtcttgtgccctgggagcccctcatgtgggagacaggtggtggatgtcaggaagagctagaggtgggaagggtaggcttgatatttagactatgtgtcaagtagggcagggccagttactgaaataccgaaacactagttgtcatttggaaatggctgaggccccaggctccctgaggcccccagccaccttgtccttggaaccttgctggtgctcactggcccatacactgtctgcccagtgtattccctgggctctgaccccagtccctatgtgtcctcttgaccagggtatgcacctggacgtcagtgggaattcacttccccaggggaagtgctggaatccccatatacacttctggctcctgaggctgtgtctgctggatggtgcctccccagtgtcactgtcccgtggtggcttgtgggaaccctgcctgcactgtgaacggtatcggtcgttatgtatgctgacaatcacccctggtaaaggaaggggacagtagggtgaagaattctgttttgggtgcctggccgctttgcagcggggacagagggcaagacctggcaggcctgcagtcttcctcggctatcgtgaagagggttgtgagtgccaaatccatcccatagggagatcccagaggagactctggcaccccctctgccagagggcaggcccatgagtgcggccctgcagaccaacagtttcttaccctccttccttcgcgagacctggcacagctgcctgcctcactcctgggagccgagtcctactgggagctcgttcctgccaaggctgggatccagtccccctctcccctctgtgggcacttggcaggccgaggtccctgcttccctctgccagttcctgccaaagctaatctccctgcggcctgttcctggcagtggttgcacgtgggtatctctgctgggcaggcctgcttccatcactggcacggaccccatttcccaagaatcctttttgggtggcacaatcccaggcagaattctcccaggaggttcctgagtgcctcccttgctggttcagcacctgatcacgttcctggattccccctgaactcctccagtgtctgcaggatgcttttcagttcacaaagcactttcatattatatctcattagatgctcagcagcccctcaaacagcaagtggtgcccttgagcctgcagggccctggagtgggcagatttcctgaaccatctgctctgactctgcctttgggccagtggagaggcctttgtgagaccaaatcttcaggttctcggtggggcaggtggcagttcagtaggaggtggcctcgggcctcctcttctggggaaggtgtcagagaggggtcaggagactatgtagcctcttgtggccccagtcccctgatcaaaaaccaataggaaaagtctcttagaagagaaacagcttttgggttaatctgtaggggcagtgagaaagggttggggaggttggggcccagctgggccacgtggattcgatcttggcttagagtgggcacaggaagctatgtgatgaaggggagcccctagggaggaatctgggtacaggggatggggctggaatcagctacctggtccgtaagttgtgttgttaaatttggagaaaaactgttttccaaaaatggaggtaaattgaagtttgtaagagctggtgaataagccatgcctccttggtggtttggagcaagacgttttccacgcaggccatttcatcaagactcagtggtaatttgggattgcctcagctctcccagctcggctgcctgttgctgtcagtgggtctggggggcctcagggctgcagaggcttggtggtgtgggagtccttcacctgagggctgacgtgccttttgggggtctggagcatacttccaggagacaacctctcttcctcctgtcacctctgctcctccctcagcctccctgtgttcctttaagcagggggcatgggaagaatttcttctgaagcaactgatgttctaaatttgagagaggggaataccatcatgtggcctgaagttagcagcccagaggctgagggctgtggctctggcaggtgctggtgtccagggtgcaaggaagactccaatgtccagaggactctcatgaaggtgactgggagcagactgtggtggaggtgacagctcagggaggaagatgggattgtcaggactcagttctttgctggaagagacttctcttccatggggtggtgagtccaagtgagaccttggttcctcttcctgggtagaatcctcccttccattggaattatcctaaaggtccaccccactgactcctagcggcctctttcctggtaaggaagtctgattggcttttggcttggctaacctgagtcacttcttccagagctgtcctcatgctgcagccactgctgtcccacagcagctgtgggtcatccttcagctacagatcctcccattttccttgtccccccatcagtgtgcgtgcacacttctgtgtatgcaggtttggggtaggcttggtctgcaactgcgggggccatgcgcagttgagttcagtctggtcatgccacagaattatttacactgaaaccctaaaaccctctagcgaaaggttagatctttaagtcagacttgtttggcaggtcagtgagatgacagggaggtttaagacctgaattgggggatggggcacaaaggagtcgtggctgtttctggatctaaggcctctgtagggaggtgagatccagactgggtagaggctggtgattcttctggagccaactctgtgccaggccctattgtggctgtggaggagcatagttaaaactctgtgctttccaggacttgaagtctgtgcactgcccttactacgataaacaaaggaatgaaagttcctctcccaggtccatgattcagagggctcttaggggtatgtgtgtaggaggcggtttgctgctcatgcagacatttggagaaactctggttccatctcgtcacccccacaccagcatccaggaagacatatgggcagactggtgcgggccagcaggtgtggggatgcttctttgctgtgagcttctgccaggtgttagagagggaaatcgaagtgtccagctgccccagagctgggagtccttcagatttaccagaactttctgattacaaagacttcctgcttattgttttgattcttaggattataatcttacttttgctttccatgctcacatccccagtctgaatctggggctgcttctcaccactgccagcctcaaggcagagaaggcaggctcctctcccatttgtgttccctctaaatggttgcataggtactcgcttgcagaaccattactaccaatagtggaaaaatgagatggggagggcaatatacttttattcttattttatttgagacaggttctcattatgtcacccacacccatgctggagtgcattggtgtgatcacagctcctgggctcaggtgttcctcttgcctcaggcaatttttaaaaaatttcacacttgattggccaagaacctcccctccgacccccacaacaacctacccagcatttactcctcagtctgaggacacgtccctcacatcagcccctctgctgtcttgaaaggctcacctcctggaagctggctcctccctgattcagggcccagcacagcgtcggaaaaatggagcagtgctgcccactgtgttcgaaggcctccctcctctgttttattctgggccccttgggcagggcttacatcagagccagtcctccttggctgattcaaagggacaaactcctgggtcagtcctgaggacaaggaatagtgagtgggtgagggaggggctggcaacaactggagtgtgtctggccacaagctagactgtggctgcagctgatggccatcatcaagctggcgccaaagctgccctcctgcccaggtttccagagattctctagctagttctcttctctgttctttggaagatttactgccttattccaccgctttagtggttatcctacaatttcctacatttttctttgacttaaataagtaaaatctttactccttttcctgagccattcaaggaacttgggttattttaactttactttcctcctgccttacatgattttcttttaaaaacttaattttatttataattccagagttatagaaaatttgtaacagttggtgtacagtatttccatatatcccctctcaagttccatatatattaatatttaactacatataccttataattctttccctccccaacatcatttttttctgaactatttgatactgatctacatatatgtgctgtgttacccctaaatatatccttgtgtatttcccaagatataaaaatattctcataaaattatcacacagttatcaaaagcaggtaattaagaagacacaatgctatactctaatttacaaaccttattcaaatttcaccgaatgtcttagttatgtctttatagccagagaaggaaaaaaatacatatttttcttgtctaggatttagtctagaatcatgttacatttagtcatttctagtcttctttaagccgatttctcttggtctttctttcacttttcttttttgaggggtacaggacaattattttgtagaatgaccttatttgggtttgtctgatgtttcctcatgattagattccagttatgtatttctggcagaaatgccacagaagtgatattgtgtccttctcagtgcattgttatcaggaggcacatgatgttggtttttgtcccactgctggagataataactttggtcacttggataaggtggtgtctgccaggctttgtctgccattgcaaagttaatattttcatttggtaattaagctttgggaaatactttgagatgatataaatattctgtttctcatcagactttacccactaaattttagcatcctttgatgattagtgtttgaggtataatggttgtaaaatggtgaattttctgcttccattatttctcatacatttattagttgttactctactgtaaggaagagtttacctccctccctcccaatccatccatccatccatccatccatccatccatccatccatccacccgcccatccatccatctacctacccacccatcttccattcagtcagtctggattcatagatatttattttatttaattagttatgctttgttactagcattggtgattttgatgatcaaaattatcccagattagtcctgtgagagctcctccaagttgattcttgtgtctttttgacacactgctattactttttgagcacttccttactttctgttactacaagatattccaggctcatcttgtactttcccggctcaaactctgtaatctggtatttttctaagaaaccctgattccttttagcagagaattgtgtataaaaacaaaccaagacctggaataggtctgttcattgccagagtgttgttatttttaggccctgtcatacatatacacacatgtgtgtgtagtatatatattatgtaaatatgcacacacacacatgcaaatccattcatctatctacctacctacttacctacctatctttcttaaaaaccatgagttcatactgatatgaccagttccaatccaacactctagagttcattttaaccttctctctttccatatatgtaatttccttctccaaccgtgaaaaacctggtttcagttacccacagtatatttacttatttgcttaatcctagaatacacagaatgtagtttcagaattgttaactcatgctggtgtgggaaacaaatctattaaacagagttcaatatttgctactgtctttttgccctagcctgagaatacagaggcaaagtactgcttcaaaacttctgttatcaccccctacccgtactgtgttttgtcattcacttaacctacagttcggtacacttgcttccatatgtattcaatgctaatgtttcctccttttatccttgttgattgtatttactgaaaaactgagtacatgaaacattaacatggttgtaaaagtcagaacagatctgtacaaaaacatgaactcagagaagtgtcactgccctccatcttctctaccttgctcccaccatcttattcttttcacccatcaggctaaaaaaagacatcagagaaaaatatatcctaatatgttgagtttattcgggagtaagcaaaaggattataatctgggaagcacagctgtagcaagccataggtacaggtacatcaagccaaaggtaaagggaaatttttactggcaaggagaagctatgtaagctgcttggagacagagttcattggttctggaggctcaaagctagaattagcatcagttcattggtggagatgccactgctaggcatcggcctagcatcttatcagaattgctacagtcctaaagaatgtatagtgataaacctggtcatagaaatatgtgcatgcatgtaaaatgtaaaatgcatgtaaaatgtagatcatgaaaagcatgagatgtataaaagatgaaggaatttctcgtggagttattttagaaagtccttgaaatagtccttatctcagatgtgcaagcatgagctgtgctcctttgtgtgttctggctccagtttgctcgggtctgacaaaagtgacttattttgctatctgcaactttagtcactccatttccacccactcctgtatggaaccaatctcattagtttctgggtttcctttcctaagtttctttttgtatagttgtgcagacaaatatatattttcttattcccctttctttcttgcacaaaacgtggcataccataaacactttctcacactttgctttttaaatttaacagcatatcttgggagccattctatatcagtttatagatgtcatcctcattcatttttatagctgcagactattccattcgatgatgtaccatagttcattcaaccattttcctatgtaaagtcattttggttgtttctaatatttttcaattataaacaatgctacaatgaaaatccttaaacatatgtatttttgtatatatttgaatatgtattaccaggataaattataaaaagggggaaaagcatgtgccattttgtttgatatcatcaaattctcccccattaaggttgtactaatttccattcccatcagaaatgcttgagcatctactttcttcaagccttgccaacagaacgtgttagtgtatgtttacatttttgccaatctgctaggtgagagataatatctcagtgttattttaatttgcatttctcttattatagttgaggctgaatgttttttcacatgtttacgggacattttaattcttttttcagtcaatggtctgtttatgtctttgactatttgaccatttttatatcaggtttttgaaacttctatcgagtagaaaaagttatttatatattagcgatattacatatgtatctgtgttatatattaccgatcttttctctcagtgtttaatttattttgggatttttttttttttttctgcgacagagtcttgctctgttgcccaggctagagggtagtggtacaggctcggctcactgcaacctccccctcccaggttcaagcgattctcctgcctcagtcttctgagtagctgggattacaggtgcccgccaccacgcccggctaatttttgaatttttagtagagacggggtttcaccacgttggccaggctggtcttaaactcctgacttcaggtgatctgcctaccttggcctcccaatgtgctgggattacaggcgtgagccacagcacccggccaggacttttcttttttctttttttttttgaataaaataattttatttttgtataataaaataattttatttttgtataataaaataattttatttttatataatacaatttatcagtcttttattgttttggatgagttcacttccattaaatccagggaagtgaaattatatatgtgaccttaatatgagttttaataatctacttttcaatttttcagtattttaaatatttctttaatgttctggaaaaaatagccactagcaaatacagaaatacgtgtacacaggggcacacatttttccttttgtctctgtctccagtacgtctcagggcagcactgagcagaggcctatgggccatctcagtctttcattagagccagtagccaaaacatatctgtccaagagctatgacaacagcagcaaagcttgtggaagcctcagccaacttagtcctagagtttccaccaaactgaatggttccccatagtgaacactgttttactgagagaaaacagtcagcgcttcttggttatccacctccctaagagttataatagcgatagaaaaatatgagaaaacttcaacttcagtagatttagttctgacgcctccgctaaacttagtggttccccatgctctgcggacgcttatattcacagaatatcctcaccactttttgctagttgcctaccctctgtgacatatcgttgcctcccccttcgcatatcactgtccagtgtggcaatactctacacacagccacctccttcttttaaaggaggtggctttacctctgttaagggactatcatgctctttcagatctttttttaaatttttattttttaaccttttaaaaatttcaatagtttttggggaacaggtgatttttggttacatggataagttcttcagtgataattactgagatgcagccatcacctgagcagtgtacattgtacccaatgtgtagtcttttatccctcgtccccctcccaacttcccccttgtctccaccgtcccttttatcattcttacacttttgcgtccttgtagcttagctctcacttataaatgagaactacaatatttggttttccattcctgaatttcttcacttagaataatggtctccaattccatacaagttgctgcaaatgccattattttgttccttttaatggttgagtagtatttcactatatatatatatatatatctcacatatatatcacatatatatgtgtatataaatgtgatatatatatgtatacacacactacatttttaaaatccactttttggttgatgggcatttaggctggccccatatttttgcaattgcaaattgttttgctataaacatatgtgcaagtgtctttttcatataatgaactcttttcctctgggtagatactcaatagtgggattgctggatcaaatggtagttgtactgttagttctttgaggaatctccatactgttttccatactggttgtactagtttacattcccaccagcagtgtagaagtgttccctgttcactgtatccacactaacatctacggtttttttgatttttttattatggccattcttgcaggagtaagggggtatctcattgtggttttaatttgcagttccctgatgattagtgatgttgagcagttttcatatgtttgttggccatttgtacatcttcttttgagaattgtctattcatgtcctttgcccactttttgatgggattattttttttttcttgctgatttgtttgaattccttgtcgattctggatattagtcctttgtatgatgcatagtttgcaaatactttctcccgtcctgtgggttgtctgtttactctgctgattatttcttttgctgtgcagaagctttttagtttaattaggtcccatctatttttgtttttattgcacttgcttttgggttcttgttcatgaactctttgcctaagccaatgtctagaagagttttactgatgttatcttttataatttttatagttccaagtcttagatttaagtctctgatccatcttgagttgatttttgtataaggtgagagatgaggatccagtttctttcttctagatggtgtccttttcccactttatgtttttgtttactttgtcaaggatcagttggctttaagtatttgagtttatttctgcgttctctattctgttccattggtctacatgccaatttttataccagtgccatgctgttttggtaactatagctttatagtagaatttgaagttgggtaatatgcctgcagatttattctttttgcttagtcttgctttggctatgtggtgtctttttttgttccatattaattttaggattattttttctagttctgtgaagaatgatgatggtactttgatgggaattgcattgaatctgtagatcccttttggcagtatggtcattttcactatattgattccacccacccatgatcttgggatgtgtttccatttgtttgtgttgtcaatgatttctttcagcagtgttttgtagttttccttttagagatttttcacctccttggttaggtatattcccaagtattttattttttggacacccctcatttaattgtttgtagatggttcatacctaaaaagaaaaactacaagttgccaattatgttatactatcacagacttgaatttacctttaagcttctcaaagaaatgaaatctgttcagatggctaaattgcctttgtccagacatgccagccaacaaaagataaaaaacaaatacttgtcctgatggtgggtatgattttgggttggcccatgattttgaaatgctttaaaaaaaaaggacattttctgactgttacaggaatccttataaaatggatagcaaattaaggaaccctgagaagttttccattacctaaagaaatggccatgataaatgtagaatttagcaaaagtgcttcatgatattacccataatacaagagataaatctgccatgatttttattttattttttattttttgacttttattttaagttcaggggtatatgtataggtttgctacataggtcaactcatgccacaggggttgttgtacagattattttgtcacccaggtattaagcctggtatccattagttattttgtcttatcctcaccctcctcccaccctgcactttctggcgggcctcagtgtctgttgttcccctctctgtgtccatgtgttcttataatttagctcccatttacaagtgagaacatgtggtatttggttttctgttcctgtgttagtttgctaaggataatggcctccagctccatccgtgttcctgcaaaggacatgaccttgttcttttttatttgtcatgatattgaaccaacattgatgggggtaattttaggaggtttcatagacatttccaaaatatgtccaacctgacaatgacacaatcctggcaagattttaaggataggtcatggacaggaaccgaagtctcactgcccctttgaacgtctccaaatgtgctgagtgcattctgattattgttgtttattcttagggttagttgatgttttaccttactggagagtggtagctatagtggtaggaacaaatttgcttaattttgttgtatttctgacttggaaaatcccaacttattttgcagttaagaggaacacacatatcactggtactgttgttactgaaccctgcaatgctttactttttactcagaatctctactgacctttatcatccacaaaattcagggaaaagatagaactaaaattctaaaagtataattatcagagctctcaaaaccctcacactcctaaggcttgaggagtgctattggtgttgatggaagtaagaccaattttcaggacctacaggtggccacctttggaattcataacaggcttcctcactacttgcaatcctagattctacattatgagtacaagctgatatgattcattgctgaagggtactcacaataactccagctttatcaccaacaggtaaacgctgcatttctacaacagccacctgtgcaggccctgcatgctctgtaacctggggatttggtcttctgaaaagggcaccagagaaaaactgctcttaagcctctgttaactgacacagcagtagaactccaaggtgttgatccttggattcatgtttctcaacttcagagacacacatcactccttcctgaccactgggcatccatcccaccaggagctcctaatctgagagctgttagaaatcctccaaaagtgctgactgcagaagttggtagcttctgctcaagatgacagaacaagattaacttttgtattcttcagcaccttttttattttccattatcacactttgataccctctaaaacattaaaacaccttctagaatgcttatgtgatcaacttgatctttgtcttattaattttgacctctgtcatctccttctaccacttaagaaaaaaccaaaactcccttgtgcatctttttcaaaccacagctactgccctgaatttaactaattactgacaaaatctagtaagtatcacttcagacacttcagaaggaagtacaggccctttctagtacttaagtttgccttacaccacaaatcccaaccttcagtcctgtaaaaactggagcttgatgtcacatcaatggaatgcttctgacaatgtcatcacaatcctttcagcacaacctgggtgtcatgagtgagcactgacataggactatccttgctacagctaccactctgttctcttcagagacactctggcttgcttctcaaaaactgtttaactctactcaagaacagcccacaaaaaatcctgacccatagctgttgtgctaaaatgaactttctgtttccatacaatctgtgccccactaagatgctaccaaagcagacatcaggcttacactgcctgctgtaatataggaagtagatgtttccacatcaataaatattcctttcatacgctgctaatgtattcatgcagcccattagatagatgtactaaaacgaagttagccagttttaaatataattttgtatttatgtgctcttttaatttattcatattaaaacagacatgatcattatcttttaatatacattttacaacttgtatggttattttttgagaataagctgacagatttggattgatgggtaaaatgtaagcatatacgttaaagggtttaaaaaaatctgtaatgctaaactattatccagtgaggttttattggtctataatcccaacaacagcctacccattgtcagcttgctcacacccatgccagcactggaattagctagccttttcatcttcgctggagcgggaggtgatccagtagaaaaaaatggcaccattttttccctagttagaaattcttgggttactggtaaaggtgaactttccttctgttgttcggctggactctagacaggagctggtgtgaggcaatttaaaatgctgctttccagagaggcctggagagactgttctctgtgctgtagagggagctgttcatgagaagagggagcctgaaagggcgttgtcattgttgttctctcctgctaccccatgcctcacagaaaggtccacaggccaggaacagggaaaggggttcctgtgtttatgccacttgtagacggcacaatacaaacctggctgcagaaagagaaaaagagaaggttatcatcagacacagtgaataatgggaaataatttcagagaatcagaaaactgttaactagaaagtgaggctgaggaagtgacctacgagaaatggacaaggactcgatttacacagtaacgagagggacagagagagaaacccagagaacaggcagtggctggcacagaggcggcagggctgagaggaatggagtgagtgtctcccagacagtgagctctgagctgcactatccagagcacaggggaacgccagagcgaagagccccacctcctcaaggaggcagaggctttccacattttctctaaactctccttccctcccaaataaaatggccctgtctgtcccatggcctctgcctcaactacaaaaatatctgtccccctgggggtggggaaggagagatgtgtcaataccagggaatggctccagtgagggcaaggaggcctcgctgggcaggcgggggactaccagcatccatctgagcagccccactctcagcatccaggacgacacagaggaaacacaaaagcttatgtcccagaatcctggagggatgtgggcagga

SEQ ID NO: 98 - DNA, 1161 bp, Homo sapiens
acccgggaaaccggaagccgcctcccacttggttgctcgtacgcggctagtgggtcctcagtggatgtaggctgggcgccgcgatgttcgacgggacaccggcggagagcgacctcggggttaaggggtggggctgacgtcaggagccaagatggcggcggtggtcgccctctccttgaggcgccggttgccggccacaacccttggcggagcctgcctgcaggcctcccgaggagcccagacagctgcagccacagctccccgtatcaagaaatttgccatctatcgatgggacccagacaaggctggagacaaacctcatatgcagacttatgaagttgaccttaataaatgtggccccatggtattggatgctttaatcaagattaagaatgaagttgactctactttgaccttccgaagatcatgcagagaaggcatctgtggctcttgtgcaatgaacatcaatggaggcaacactctagcttgcacccgaaggattgacaccaacctcaataaggtctcaaaaatctaccctcttccacacatgtatgtgataaaggatcttgttcccgatttgagcaacttctatgcacagtacaaatccattgagccttatttgaagaagaaggatgaatctcaggaaggcaagcagcagtatctgcagtccatagaagagcgtgagaaactggacgggctctacgagtgcattctctgtgcctgctgtagcaccagctgccccagctactggtggaacggagacaaatatctggggcctgcagttcttatgcaggcctatcgctggatgattgactccagagatgacttcacagaggagcgcctggccaagctgcaggacccattctctctataccgctgccacaccatcatgaactgcacaaggacctgtcctaagggtctgaatccagggaaagctattgcagagatcaagaaaatgatggcaacctataaggagaagaaagcttcagtttaactgtttccatgctaaacatgatttataaccagctcagagctgaacataatttatatctaatttgagttcctttaaagatcttggttttccatgaatacagcatgtataataaaaattttaagaaataaatgttattctactttattaacaaaaaaaaaaaaaaaaaa

SEQ ID NO: 99 - DNA, 2592 bp, Homo sapiens
gcgtcacttccgtccagaccggaacccaagatggctgcgctgttgctgagacacgttggtcgtcattgcctccgagcccactttagccctcagctctgtatcagaaattggtctcttcccatggcgatgtccatctgccaccgtggcactggtattgctttgagtgcagatgtgggacctaggaaaaggcctgaagattccccagctataccagtctggagtggttgtcctggttcttactgtgttgtcctctatggggctggcagccatgtgaagaaaggaggctcccagcatcatcttcctacacattattacattcacccatctttctgtttgtcattcttatctccagcctgggaaaagttctccttatttgtttagatccttttgtattttcagatctccttggagcagtagagtacctggtagaccataatagtggaaaagggtctagttttccccttgtttctaaagatgaggtggctgcaaaaactccccttttttgcccacagcttgcctactctcggcctagaagcagttattctctctccatattgggctttgatttgtgctgagggtcagcttttggctccttcttcctgagacagtggaaacaatgccagctctgtggcttctgccctggggatgggccgggttggggggtgggttggtgaggctttgggtgccactgcctgtgggttgctggcttaaaggacaattctcttcattggtgagagcccaggccattaacacctacacagtgttattgaaagaagagaggtgggggtggaggggaattagtctgtcccagctagagggagataaagagggctagttagttcttggagcagctgcttttgaggagaaaatatatagctttggacacgaggaagatctagaaaattatcattgaacatattaatggttatttctttttcttggatttccagaaaagcctcttaattttatgctttctcatcgaagtaatgtaccctttttttctgaaactgaattaaatactcattttatctttgactctccttgaaatctagagaaaccaagaaaatggctgttgggaaggaaccaatttcctcctcttccctcgggtctcaggcatttacatcctccctctccccgcaatctgacctttaccaggagggaaacagttctcctacatctcatcattggaaaagttttcagggaatcagatagaacttagccagagatttaaatatcacagaaaagcctcagagaaggaaggagaaaaagaaaagaagtgacgcatgtagagtgcttttgggttataggcaccaaaatcccattaaggactgattataagcttcatggtacagttcagcaaattatgattcattgaggggcacagaggaccagtgttggtgacagctaggggatgatgacctgaggttataggcttggggtgaatgaagcatagagtttttttttaaaaaagaagggattgttgaaaacctggcaaaaatgtataatttaatgagaaaacttgctgcttttaaaatccatataggccaggctttagcaggcatgctgttttgatagtttttgggaactctggaataagagacttatctcatctgtcacttcgagttgttggccagccagttaaagctgtgggtcgaagaggggaaatgttaactggctggtgtcaattggataggaagaccttagttaaggtggggacccgctgttttaacagtcttcattcagggtcccaaatagtatttggctttaagtaatgattggttttccctttttactagaggggccctgggaagtccttgtacctttcctccattttaaaccagctgttctctactttgtccttggaatgagggacaagtgatcatgacagaacactttgtcattgggactgggaaaggtttggcaagggcattaaatttaacagccagtgccaggaaaatataaaatggggtcaatgataaacagctgttagaggctggaaaatgggtagggcagttgaattttttggtggtttcgtaccatttgggtgattgaagcatggtagtgggtgggtggggggtgtgacagagcatcatgtttgttattctgccttaaatttctacttactgtctttttcttctctgtcttccaatcactttaatatcttcaattttcaaactatatttgtacttgggcttagatagaaagtcttacacaagcatagtatcttctactttggttttccctaccttttcttccccaccttctccaaacacacatatacatactctactcaattctatttctgattttgtagttgttagttgtccatgctcaggataaaaaatgagtgggtagggttgagggactggttctttgaggttctgccctttttccatgattcagaccaactttctcttggtcatttctggagtataactgactcaattcttgtaaaaatgtgttccacccaaaccactgtatgttcttttccctactttattttctcctaccttccttctcctaattgtgttacaagaggcagccatagcaagaatggaaaatccagatcagtaaaagattcaacaaaaaaaa

SEQ ID NO: 100 - DNA, 1525 bp, Homo sapiens
cctgttttctttcgtcgtcgtgggtgggaattgtcgcctaagtggttccgggttggtggatgaccttgagccctcaggaacgagatggcggttctctggaggctgagtgccgtttgcggtgccctaggaggccgagctctgttgcttcgaactccagtggtcagacctgctcatatctcagcatttcttcaggaccgacctatcccagaatggtgtggagtgcagcacatacacttgtcaccgagccaccattctggctccaaggctgcatctctccactggactagcgagagggttgtcagtgttttgctcctgggtctgcttccggctgcttatttgaatccttgctctgcgatggactattccctggctgcagccctcactcttcatggtcactggctggagtgcaatggtgcgatcttggctcggcacgatctcggctcagcacgatctcagcttactgcaacctccgcctttcgggttcaagcgattctcctgcctcagcctcccaagtagctggcattacaggggccttggacaagttgttactgactatgttcatggggatgccttgcagaaagctgccaaggcagggcttttggcactttcagctttaacctttgctgggctttgctatttcaactatcacgatgtgggcatctgcaaagctgttgccatgctgtggaagctctgacctttttgacttcatactttgaagaattgatgtatgcctctttgcctctgctttgtcatgccattaagctcacaataaggaagaaataacagataagtccattggtggacagccttcttctcttaatcacaagattattttcagaatttaatctttgaggaaaaggtttgagaggaattatatctaagttgtgagactgagttctatattctggtgagttaatggggttgcctcccagcttcttataagactcacagtataactaaacatgatatatcagcttttgcctttcaatttatcaatctcttaaagagaatccaactttattacgattagtatatgatcaaacttccatatttgccttgggaataatggacaaagggaaatactcttaattcatgaataaaaactttgcagaaaattagacagtgtttaattttcgaaaacttccctctctagacagtagataccacctactgatggttacatatactagggaaattttaaaattaggaaatgctgatagctcatattataaatttctaaatcctaggaagaaacgcttggagtgcttctgaatatacagaagttccatttaagggcaagtttccctgtagatgtatcaaaatactaccaactgtaaattgagatttaattcccaaatgtattctacttgttctaaaacaatctgtccacaaatataaaactataagtaataaattgttattttcgcacaatgggaatctctaatgtgaaaatgtattctatgaaaataatttttttaaataaaatgttatataataaaagtgtcttctatgcttttatatatta

SEQ ID NO: 101 - DNA, 1433 bp, Homo sapiens
agagccggttcctggaaagagctggttccctggcaggctggagggcaggagctggggccacgctggtctgggatagttgggcagggagacggagtctcgatctgtcacccaggctggagtgcagtggcacaaccttggctcactgcaacctccgcctcccaggttcaagtgattctcctgcctcagccttctgagtagctggaattacaagctgtctacctggtctccagaatggacggccctgtggcagagcatgccaagcaggagccctttcacgtggtcacacctctgttggagagctgggcgctgtcccaggtggcgggcatgcctgtcttcctcaagtgtgagaatgtgcagcccagcggctccttcaagattcggggcattgggcatttctgccaggagatggccaagaagggatgcagacacctggtgtgctcctcagggggtaatgcgggcatcgctgctgcctatgctgctaggaagctgggcattcctgccaccatcgtgctccccgagagcacctccctgcaggtggtgcagaggctgcagggggagggggccgaggttcagctgactggaaaggtctgggacgaggccaatctgagggcgcaagagttggccaagagggacggctgggagaatgtccccccgtttgaccaccccctaatatggaaaggccacgccagcctggtgcaggagctgaaagcagtgctgaggaccccaccaggtgccctggtgctggcagttgggggtgggggtctcctggccggggtggtggctggcctgctggaggtgggctggcagcatgtacccatcattgccatggagacccatggggcacactgcttcaatgcggccatcacagccggcaagctggtcacacttccagacatcaccagtgtggccaagagcctgggtgccaagacggtggccgctcgggccctggagtgcatgcaggtgtgcaagattcactctgaagtggtggaggacaccgaggctgtgagcgctgtgcagcagctcctggatgatgagcgtatgctggtggagcctgcctgtggggcagccttagcagccatctactcaggcctcctgcggaggctccaggccgagggctgcctgcccccttccctgacttcagttgtggtaatcgtgtgtggaggcaacaacatcaacagccgagagctgcaggctttgaaaacccacctgggccaggtctgaggggtcccatcctggccccaaagacccctgagaggcccatggacagtcctgtgtctggatgaggaggactcagtgctggcagatggcagtggaagctgccctgtgcaactgtgctggctgcctcctgaaggaagccctcctggactgcttcttttggctctccgacaactccggccaataaacactttctgaattgaaaaaaaaaaaaaaaa

SEQ ID NO: 102 - DNA, 832 bp, Homo sapiens
aagaagatgaacaagcgccagggtgtgttgctgagagtgagtggtcccagtggagggaagatctttggagatgtggatgggggcccaggaattgagacagcacagtgttgatggaccacccacctggctctgcagatcaccccaacaactgcaggattgtgaagaggaagattgaggcaggtaccaaactctattaccaggttttaaacttcgccatgatcgtgtcttctgcactcatgatatggaaaggcttgatcgtgctcacaggcagtgagagccccatcgtggtggtgctgagtggcagtatggagccggcctttcacagaggagacctcctgttcctcacaaatttccgggaagacccaatcagagctggtgaaatagttgtttttaaagttgaaggacgagacattccaatagttcacagagtaatcaaagttcatgaaaaagataatggagacatcaaatttctgactaaaggagataataatgaagttgatgatagaggcttgtacaaagaaggccagaactggctggaaaagaaggacgtggtgggaagagcaagagggtttttaccatatgttggtatggtcaccataataatgaatgactatccaaaattcaagtatgctcttttggctgtaatgggtgcatatgtgttactaaaacgtgaatcctaaaatgagaagcagttcctgggaccagattgaaatgaattctgttgaaaaagagaaaaactaatatatttgagatgttccattttctgtataaaagggaacagtgtggagatgtttttgtcttgtccaaataaaagattcaccagtaaagatgg

SEQ ID NO: 103 - DNA, 3656 bp, Homo sapiens
agcgatccgaggcccggccccggccccgccccgcgccgcgccgcgccgcttgccgccgggctagcactgacgtgtctctcggcggagctgctgtgcagtggaacgcgctgggccgcgggcagcgtcgcctcacgcggagcagagctgagctgaagcgggacccggagcccgagcagccgccgccatggcaatcaaatttctggaagtcatcaagcccttctgtgtcatcctgccggaaattcagaagccagagaggaagattcagtttaaggagaaagtgctgtggaccgctatcaccctctttatcttcttagtgtgctgccagattcccctgtttgggatcatgtcttcagattcagctgaccctttctattggatgagagtgattctagcctctaacagaggcacattgatggagctagggatctctcctattgtcacgtctggccttataatgcaactcttggctggcgccaagataattgaagttggtgacaccccaaaagaccgagctctcttcaacggagcccaaaagttatttggcatgatcattactatcggccagtctatcgtgtatgtgatgaccgggatgtatggggacccttctgaaatgggtgctggaatttgcctgctaatcaccattcagctctttgttgctggcttaattgtcctacttttggatgaactcctgcaaaaaggatatggccttggctctggtatttctctcttcattgcaactaacatctgtgaaaccatcgtatggaaggcattcagccccactactgtcaacactggccgaggaatggaatttgaaggtgctatcatcgcacttttccatctgctggccacacgcacagacaaggtccgagcccttcgggaggcgttctaccgccagaatcttcccaacctcatgaatctcatcgccaccatctttgtctttgcagtggtcatctatttccagggcttccgagtggacctgccaatcaagtcggcccgctaccgtggccagtacaacacctatcccatcaagctcttctatacgtccaacatccccatcatcctgcagtctgccctggtgtccaacctttatgtcatctcccaaatgctctcagctcgcttcagtggcaacttgctggtcagcctgctgggcacctggtcggacacgtcttctgggggcccagcacgtgcttatccagttggtggcctttgctattacctgtcccctccagaatcttttggctccgtgttagaagacccggtccatgcagttgtatacatagtgttcatgctgggctcctgtgcattcttctccaaaacgtggattgaggtctcaggttcctctgccaaagatgttgcaaagcagctgaaggagcagcagatggtgatgagaggccaccgagagacctccatggtccatgaactcaaccggtacatccccacagccgcggcctttggtgggctgtgcatcggggccctctcggtcctggctgacttcctaggcgccattgggtctggaaccgggatcctgctcgcagtcacaatcatctaccagtactttgagatcttcgttaaggagcaaagcgaggttggcagcatgggggccctgctcttctgagcccgtctcccggacaggttgaggaagctgctccagaagcgcctcggaaggggagctctcatcatggcgcgtgctgctgcggcatatggacttttaataatgtttttgaatttcgtattctttcattccactgtgtaaagtgctagacattttccaatttaaaattttgctttttatcctggcactggcaaaaagaactgtgaaagtgaaattttattcagccgactgccagagaagtgggaatggtataggattgtccccaagtgtccatgtaacttttgttttaacctttgcaccttctcagtgctgtatgcggctgcagccgtctcacctgtttccccacaaagggaatttctcactctggttggaagcacaaacactgaaatgtctacgtttcattttggcagtagggtgtgaagctgggagcagatcatgtatttcccggagacgtgggaccttgctggcatgtctccttcacaatcaggcgtgggaatatctggcttaggactgtttctctctaagacaccattgttttcccttattttaaaagtgatttttttaaggacagaacttcttccaaaagagagggatggctttcccagaagacactcctggccatctgtggatttgtctgtgcacctattggctcttctagctgactcttctggttgggcttagagtctgcctgtttctgctagctccgtgtttagtccacttgggtcatcagctctgccaagctgagcctggccaagctaggtggacagacccttgcagtgatgtccgtttgtccagattctgccagtcatcactggacacgtctcctcgcagctgccctagcaaggggagacattgtggtagctatcagacatggacagaaactgacttagtgctcacaagcccctacaccttctgggctgaagatcacccagctgtgttcagaattttcttactgtgcttaggactgcacgcaagtgagcagacaccaccgacttcctttctgcgtcaccagtgtcgtcagcagagagaggacagcacaggctcaaggttggtagtgaagtcaggttcggggtgcatgggctgtggtggtgttgatcagttgctccagtgtttgaaataagaagactcatgtttatgtctggaataagttctgtttgtgctgacaggtggcctaggtcctggagatgagcaccctctctctggcctttagggagtcccctcttaggacaggcactgcccagcagcaagggcagcagagttgggtgctaagatcctgaggagctcgaggtttcgagctggctttagacattggtgggaccaaggatgttttgcaggatgccctgatcctaagaagggggcctgggggtgcgtgcagcctgtcggggagaccccactctgacagtgggcacacggcagcctgcaaagcacagggccaccgccacagcccggcagaggggcacactctggagaccttgctggcagtgctagccaggaaacagagtgaccaagggacaagaagggacttgcctaaagccacccagcaactcagcagcagaaccaagatgggccccaggctcctccatatggcccagggcttaccaccctatcacacgtggccttgtctagacccagtcctgagcaggggagaggctcttgagacctgatgccctcctacccacatggttctcccactgccctgtctgctctgctgctacagaggggcagggcctcccccagcccacgcttaggaatgcttggcctctggcaggcaggcagctgtacccaagctggtgggcagggggctggaaggcaccaggcctcaggaggagccccatagtcccgcctgcagcctgtaaccatcggctgggccctgcaaggcccacactcacgccctgtgggtgatggtcacggtgggtgggtgggggctgaccccagcttccaggggactgtcactgtggacgccaaaatggcataactgagataaggtgaataagtgacaaataaagccagttttttacaaggtaaaaaaaaaaaaaaaaaaaaa

SEQ ID NO: 104 - DNA, 583 bp, Homo sapiens
gccagctgccggtctttcgggggctccgtaactttctatccgtccgcgtcagcgccttgccaccctcatctccaatatgcctggtccgacccccagtggcactaacgtgggatcctcagggcgctctcccagcaaagcagtggccgcccgggcggcgggatccactgtccggcagaggaaaaatgccagctgtgggacaaggagtgcaggccgcacaacctcggcaggcaccggggggatgtggcgattctacacagaagattcacctgggctcaaagttggccctgttccagtattggttatgagtcttctgttcatcgcttctgtatttatgttgcacatttggggcaagtacactcgttcgtagattcagttacatccatctgtcatctgaagaaggaggaaaaaacccaacatttcttggaccaaaagtatagtgactatctgttcatgagagaaattttctgtaagcttgctgttttacaggggatttatcaataattgattttgaggaatcagtttttttctatggctaataaactttttaattcacttatactgaaaaaaaaaaaaaaaaaaaaaa

SEQ ID NO: 105 - DNA, 480 bp, Homo sapiens
ggcagaaacccggattccggttccggtgggcctccatcagcaagctccagtgctacgtgtccctggcattttaggtgtcggttgggcagtcatggatcaggtaatgcagtttgttgagccaagtcggcagtttgtaaaggactccattcggctggttaaaagatgcactaaacctgatagaaaagaattccagaagattgccatggcaacagcaataggatttgctataatgggattcattggcttctttgtgaaattgatccatattcctattaataacatcattgttggtggctgaatacattttggaagagagtttttcatcttagagattggtgaacaagtgtgagggtgtgagaaactcacagaatacaaatttgcctgtatgttttgtgggtttttttttttcctttcaagatgttttctatttctaaattaaagtaatttcaaagtaaatgaataaaaaaaaaaaaaaaaaaa

SEQ ID NO: 106 - DNA, 69315 bp, Homo sapiens
ttatgcctgtctttactgccatctctgaatataaattgtgaagatttcatggacatttatcacttccctaataatactcttacaatttcttatgtctgtctttactttaatctcttaatcacgttatcttcgtaagctgagaatgtctgtaacctcaggaccattattgtacaaattgattgtaaaacatgtgtttgaacaatatgaaatcagtgcaccctgaaaaagaacagaataacagtgattttcagggaacaagggaagataaccataaggtctgactgcctgcggggttgggcagaatagagccatatttttcttcttgcagagagcctataaacggacatgtgagtaggagagatatcgctgaattcttttcccagcaaggaatattaataattgataccctgggaaagaatgcattcctgggaggaggtctataaacggctgctctgggagtgtctatcttatgtggttgagataaggactgaaatacaccctggtctcctgcagtaccctcaggcttactaggagtgggaaattccagcatggtaaattctagtcagactggttttctgctctcgaaccctgtttcctgttaagatgtttatcaagacaatacgtgcacagtgggacatagaccctcatcagtaattctaattttgccttcgccttgtgatctttattgccctttgaagcatgtgatccttgtgacttactccctgttcatacaccccctccccttttaaaatccctaataaaaacttgctggttttgcagctcggggtcatcatcatggtcctaccaatatgtgatgtcacccccaagaggcccagctgtaaaattcctctctttgtactctttctctttttcagaccagccaacacttagggaaaataaaaaagaacctatgttgaaatattgggggctggttcccccgatagaaggcaggggcacttctaacagcatccaatctagagcaaacccaacttccttagtctctgacaaatcacccaatcaaagcccaaattctaagataggttctttctaataccctcctacggagataccttatggtgtattttttttccacactgcaatgagtaataaagccaatgtgctcaactacaggaatgttcctgtatatttgtggaaggaaggaaggacctgtgaaaataatgttcctaatgcaacattcactaattaaatacattgctatctactcaagggttaactgaatttaatgggagctctaagctgtttatctctaccttataaagttcacttcatcgagttcttatttaaatttagttataatccagtctctccctggaactagcagttaacaaatttatgaaaatattggacccaaggatgcctgtccagttatttagggtaaaaacatatcctggcctttcctttatctggtatgagtcaacactgctcagagaacacacatgtccagagcaaatgtcacctcacgatgaaacttggtaaacagcctgaggctccctcccccctttcatcttctatcagcttcaaacattaggtagatcaaacatactcctccacaatctatgatctgcaatccaaacttaatgctcttaattataatcatggaaactggcatgaacacccaaaacttattaatttgatcactttgatcacctgccatatgctgtcctgaagttaggagggataagatgaggtataagtccattgttcatttactccaagagctcagaatataaataagaagatgccaggttctatctcactatataatgcaagagtttatattttcatttatgcatgaaaactttaatttacctcatctataggaaagaaagtacattcttttctaagccctgaagggaaaaatattctgcttcttgcttctccctaatcctgccctggcaaataccttaatacaaatgctgacagtcttgcctattaccaattcaaatggaacgcaaagaaaagcacaggaaaggatatatcccactagagttggtgacaattgccccattctcaggaaaagtctctggaggttgtctcaccatccttaagtgaaaagcaagttggatttatgtcctcaacacgttcaggttctcagcatttgttaattgcttgattcatttcaatggcatgaggttacatcagtgtcatctgcattaaaaggtgtttattacctacctctgttgagtgctatgctgtgctgcaatgcagagcaaacaggttttctgcaacttggaaatctctgacaatgacccagaatgctgatatggacagatggaataaagacagctgagcaaatattgaagcagtctaagaattaataaataatattaacattttgtacaagtacataaccttaactgggaatgctggcaggtaaccttgaggagtgtatgcacagactggataggccatggagaattcacaaccttttttctaattaatctcatgtaatatagcaggctgataaaataaatctgactttcccacagcatattctgaaccactttggagacttggaacttccccaggaagtcaggtcctatgagaattctcagagcacgtcagctactcattgctggctaaaggcaaaagctctagcagctctaagcccttttcgcattaagggtataaaactaatttccctccttcgcctcaaccaagcaatcaataagaaacaatactatatgtaaaacatcctacaatgtagaaagtgcttttatcctgtgtctccattttgaatctcacaacagacaggcaagacatatctatcaaccaataaataattaactagtgctagtggtggcaagtccagcactatatacctatacacagaatcacatgatcatctccagcctcagcatgtttacaatctgtttataaggcaagattgtgagtgttcaatagattcttagagaaatgaagattaatgaggacagatctggttggagaagtgtgatccaagacgaaatgtgaatgaaattgggaaggatgccagagttatggctaagtgaaagaagcaagggcagttggagaaagggtagaggaacccttaggaagacatgattgtgttaatgtgaaatctggaaagtaaaacggaagtggctatttggtccatgcagcagcacccagaacaacccttaaatataagacgtactcagtaaagacaaaactgaaaaaagaagttggggcttaactaagcagcaaactttccccagttttaatcaaacagataatcactggctcttctgtagaaggcagaagtttcttccctggtacttccccaacagagtagaactgtcagcacagttcctattttgtgagtagaataagttctaattttttttattctgtgaaaagtgtagccattgaaaattttcaataggcatatgaaagcagtgtttaaggaaaattaatatggccatgatatgtgattcaggttaaagggagaatgatgtcagtgagtatggctggaactcaggtgcatcatccaggtgagagaaaatgaaagccattaggggagttttcagtgaggaagagaacagaggtacataataaaataaaacaatttaaaagttacatagtttaaactgatagaacttgattatcaataagatgaaaaagaaaggaaaatataccagattttactctatgatttataatcagaggaactcagagggaacattgttagtgacagaaatggtgatgtagctgaaaagacaagtttttggaggagataattctttccttcatctcctccgatgtgaatgagaaacagtggttggttttttaccatcttcctgaaaataaaaggctgtatctcaaaaaacaaaaaacaaaaaacaaaaaaaaaaaggaaggaagacaaatgcccagaagtgttaagacacatggccagcagagacttttccaaagtccttcacttggctggactaggttctaggccttagagctgactgtgggtggatgacagggaaagcagaatgacacggtttgagaaaagaaagggcaggcacaccaagtcactgctctgctactcagttggaacatgcctggatttcgtgcttattacatagagtatttccgtgcctgcgatgcaatcactatcacctctacctccacacacgtgaacctggtctcctgactttagttaggaaagaagagaacaatgcaactcacaagaggagaaggatgaggacaagtgtttaaaataatttttcaaagctgttggcacattttctttatgattattgtctggtgaacctagtgaaaataaatactgtattgagataatctgtgccgagcggatttatttccttttgttttgtcggagaaaggaggacaggtactgagttgcaccctggtttccgtacttcacggtactgttttatctaagttttaaaaaacacctcaaattcaactagctgtggcatttttctcagtgctcttatcactatgcccaatttaaattttttaaataaaacaggaaaagatgctaaacacattacaagttcttaaaattattccttaatatttattttgggtcaatttaaaaaggcttgtgaatccatagccttgagttaatatttagcccaggtgttagttaaattctaacttcaacagtcacccgcacttgtaaatcttgccctacgatggactacgtttcccaagagcaccccccgagttaatcacatgaagcgcattctgggaattgtagtctcggatgagcctctttctcccagtcttggactcacgcgctgattccggttgaacccaggggctaccaattagctggggccatgtccgtgagtcgtggtccaaccgagaaagctggtgtgggagcttcgtacaatgattggccaatgaatgacccccggggcggagcaatgggggtgggcggggagaccatggtgattggaccagaagcccgcgacggcgggcggggattggctgcgcgctgggtcagggaagcctgggaaggggcggaggaaggagactagagcaggaagagcagcggcgaggcggcggtggtggctgagtccgtggtggcagaggcgaaggcgacagctctaggggttggcaccggccccgagaggaggatgcgggtccggatagggctgacgctgctgctgtgtgcggtgctgctgagcttggcctcggcgtcctcgggtcagtatccgccccctcgggctgaaggcccagagcctccgccccccagcctctacagccggcggggccgtggggactccaggctcgggaccccgttctccctgggcacatctcgcactgggctgtcactcgctctttggctttgcttggcctgcgccaaaggggctatttaggaaggtggagtggggtggaaaaagaaggggcggtcaccctgcccacacctctctcccacgtaacaaactttgcgcgactcttctcacgaacgcggaattgactccaaaggaatgaatcctgatacaggagcccgagtggagcttcctcgaccctggggtagaggaagggtctggtctagaactctgggcttgggaattgtaagttaaataattgacaaacctggagctgtcactttggggcagaggaggatccatccagaccaggatgttgacagtagtttgcttaacacctgagatggtccctggtctgtctgtttaaaaacgaagacttttgatctcatcgtagccactttttacttttttgaaaccttcctgagaaagcggtgacctgtcacagtgtttctgagttgccccatgtttgttgacagtcattttatgatgtttgggaaaatcttggttcttataagatgcgttttatatagatacagaaatttgtgtgcttttgaattgattttccagttagctaatgtttattctggttctgcttttttcccccttttttaatgttttaatctgcctacatttgaaaatttccattttgagagtgttcatgaaaacttcgtgtttctaagtgttgataaataaaaattagtacagtaaaactttggaattttaatcagtttcagttaacaggacaggtgttctgtggcttgacgttttggggggacaacacggagtataaatgtcagctttttctttttttaataaatgtcagcttttttttaacagaaaatttcccagatggttatctgaatccccaaattacctgtcctagttgtaaatcaatgccataacgtcattctgcttctaaaataagaggcttaaacctaaattctatccatgatgtggtttgagataccatttcaaaagcaccaaccctatgctaattactttactgccaacatcattctttcaggtccactcccctccctccagtagtagtgatggtttgagttaatgaccagatctttagactatacttaactctcgaagcacttttagcagttatttaatatttgatcaaaaagcatgaaatgaagctgttgagcttaatgagtagagtacctgctggaccatggacctcctgcatcagaattcctcttatgggtttgttaaacattgggttttaggtctggaacagctcaggtatacatagattaacaatctccatgagggattcttcacactaaagagaactacagtaatgaaagagcacggtgtgtatccctctgaatttaattggcagagtttaaagaaaattaaagcataggaattgtgctgtctgtctttgactgcattttatatacttagagctccatgccagtggaaaagatatttgaagatcaacagttggggctttcaggatgttgtaataaaagacttaacactgatatattaaatccttgggttgtattgatgtaggtagaggactgtattcaagaaatgtctgctctgatttccatcatagttaaagctgtgccacaacatttcaatggtaaaggcagaagccttagccagaactaaaacaatgtagatgtgcatgctaaaaggtaataaaggcagtgctgtgctcacatgaagttcatatatcataaaacacctgtgcgggcccagctcatacctgtaatcccagcactttgggaggctgaagtggaaggatcacttgagcccaggagttcaagaccaacctgggcaacatggcgaaaccccatctctacgtaactccaggtgtgatggtgcacacgtgtagttccagctactcgggaggctgaggtggcaggatggagtgagccccaggaggttgaggctgcactgagctgtgattatgccactgcactccagcctggacaatagagcgagaccctgtctcaaaaaaaaagaaaaaaaaacaaccctgtgttaaataaagttgtgtaaattaagctatggattttcaattgtgattttcattcacagggtttcggcctcaaagtttaaagttttactccagtattaaaatcaagtttttggttataattttgtgtttgaacattagtggttacccagggcaggtcgcatctctccaggtggagtatggtcagccaacaaagagaatcttgattctattgctgttgatagctgttagctagtatcatgttttagaagcatgtaaaaatatgatatagtcacatgctacataatgacattttggtcaacaatgaaccccatgtaagatggtggccctgtaagaatataatggagctgaaaaattcctgtcacctagtgacattgtagccattggaacatggtagcacactttttaaaaaataaatttagtgtagtttaagtgtacagtgtttacaatagtgtatagtaacatcctaggcttcacattcactcactcactcacccacagcaactcttaatcctgcaagttccatttatggtaagtgccctagacaggtatatgttttgtaatcttttacaccatattttcactgtagcttttctatgtttagctatgtttatgtacacaaatacttactgttatgttacagttgcctacagtagtctgtatagtcacatgctgtacagatttgtagcttaggaacaacaggctacactatgtagcccaggtatgtagaaggctatcccatttaggtttaagtatacaaaaaggaaatcgcccagtgatacacttttcagaacatatcctcgtcattgacacatggctaatattagaaacattttctcttttctattaataaatttaaaggaggacactaaaaagatatttcttcattttctcaggataatagtgaaaaggttataatttttctcacaaatgcatgctttcttatttttggcagaagaggcaaatggcttaacctttttttttctttgtgccaagcagtgttagtcattttagttaggtccactgccaggtatttcaggtaataattataaattcagagagtagttttcagacagcagaggatgtttaatttcactgttttggtcgttccttaaaatattgtgagtcagcgggacagaggtgttaccccttttgacagattgagaaacagaggctgagcaagcttttgttactgaaccatgtgtcagaattaacatgtgatgaagccaggttccagacctagctctccaggtctcagaattgaagaaatttagaatcgagagtatcttaggatctgtaccaatttagagctaaagcagagaacaggatatctggtctgttttcaccaaactatttagactttctgtgtttaaaggttatcagtctgtttaatttacgtgatgaatggaaaaatgattttgtagtgatcacttttccctgaaagcatatctctggtactttgcagttttgttagctaatacaataaaaataaaaactggtccttttcaaaggaaggtgtacagttaataaaataatatgaaccatttggatgtgatgctgatgagcgagaagcgcataacttaatccttttgcatttttttcttgttgcttgatatctgtgttctgatgaaaacattactgtttgctttttatttatgcataacttcagtctctttaatccttacctgaatactacttatcagaagttcctaggttataaacaactctttaaaaagtgttgtgtgaatgtttatatcagtttgaaaaagaaaatagcttatgctttgagactaccatctggagtaggctttcccagtttagtaactgagaattatcttattcaccagtaatattagcatatagtccaggttgcgaagagagagggagagaaagagaagcatgatgcaattcacatgaaataactctgatgttacaaatcatgtttcttggagtttgaaaacacgttttgctactctaatgcctaacagcttgtgctgtgtgaaatgtacatgtctttaagtgtatttacagatgtgtccatatgattcacctgttagctacctatgtaacctgttgtggtgaggtactaaatgtagcaatgtagtgatagtgatttagagttccagctaatctaaagtttcattcagtatttgggggtatttcatatatgtttaaacatttaatatctgttttgatatattaactagttgaagtttgtgattaattacatatacttacagtacaactttgatatattatagagatgggttttttaaatttatctaaagatttgctgagaatggaatttgaaccacatgttagaaattgggctttgggtaatacttgtgaagaagttagcatgaaggacaattgttaattaactgacatcattgcctaatgttatgggcgctgtgggactaatatgtggcatacccttctctccacctgccagaagtaaaacatactttgaaggtaatctaaaagtaggtgaatatgaatagtagctgtaatttaaattttctttgacttgacagcactttcatatatggcaaaacctcactaatggactagtttcctcaaatattcgaaagaaatattgtgaggtagtgtcttgtattttgtgcataattgagttggttatacttcttagtcttaactcagtactttgataacaaactctaacacaggttttttgttatattttagagttgcaaattacaaatgatatttaggatatagccatatgaagtaaagtataaatgacaactatagtagcaaattttctagtaaaaaatgacatggtcttacagggttttgtctactggttaatttctcatacagcttatggagcaggtaaaactgaaactcactcctgaataaaatcaggtaattttaagagcaagagggaaacttaaagatgatctgacagattcgctgttttaaactggcaaggaatacaaaaatcaagcatttccatctgaacattgagttgttgcatgtgtttatgtaagagcaggaagaagagtaacaagcagccagaaaagtaatagtcagaaaacatggaaaaagtaacagaaggaaaattaatgtaatcagacaacaccaaagcaggctgtgtgaatgtgtaagcaaggtgtaaccggtggctgtttttcattgtttaatgtaagttattgatttcttactacatagctctcaattgagtgaatatatgataggaccatgctgctttttacctgcatctggttatctctgagtagagtagaacacaaatcctaaatataattgttttgcaactctgctatcaaataataattcttagtttccatccttactatagtagtaaacaatacaaatactaatgagcactaaaatgggctactctaactcaagatcctgagcagacaaacagaataggtggaagcccggagtatgaaattagagatttatttttatgaacttagtaactcattctcagaaatagactaaatagacccacaagaattggatggaatgtgaagaaatacctgtttttgttggtggaggctgttggtcttcctacctttgtaacagatggagctaatgtcttttctggagaaagagagaaactaaacccccaacccattttttttttcctttcacttgatcttttctgaacaattgctgaatatagctaactttaaaataattctatgtttatttatccaatgtttgattattatttgctatacttttcacatgttttcttttaataataactaatttcccaacaagaaagattactaaattgtcttaaaatttctttgcagatgaagaaggcagccaggatgaatccttagattccaaggtatgtactaaaatgtgtattggccagtatttgctgcctgatttaaaaggatgaattatgtatcttagaaaggatatgaggtctgcaacttttgagtaacagttgaattaaaaaggacagaaaaagacagatggtattagtattagttctagtttttctggaggaagaaaaaattactgacctacaagagggaatagtaaatatttcatttcaacttgaatgtgctctgtgtgtgtgtgtgtgtgtgtgtgtgtgtgtgtgtaagtttgaagatttaacctgtgtcatttgtttccactttccagttctcaaaaataaatccagtgagctaatgcacttattggttgattgagctctcccttccaagtactaaccaagcccaaccctgcagtcagttatgagctctgatctttagatttgagggaatgtagataaaagcaggaagtagaagtataaggtatgttgggggcatgtggaggaaaaccgaacccagactttgggaattaaggaaggcttctgggggaagtaacatctaagttgaaattcaaaaaggctacaagttaggtgatgaaggaaggcacgtgatggacacatgccaaagcctatagagatgagtgagtgtggcacttcaaggagctgaaggagatgtgatatctggattagtaaaaataacggtcaaatagggttggggaaagtcttggcattgttgataactaaaaatactttatattctcagactactttgacatcagatgagtcagtaaaggaccatactactgcaggcagagtagttgctggtcaaatatttcttgattcagaagaatctgaattagaatcctctattcaagaagaggaagacagcctcaagagccaagagggggaaagtgtcacagaagatatcagctttctagagtctccaaatccagaaaacaaggactatgaagagccaaagaaagtacggaaaccaggtagtctggacattttccttgctttttgatttatttaggggacaactgaaaattttaagctaatgaataaagaggctgaagaagactggcttcactgattattacccacaaataatatatggagtgtagtttggagagaatttctagattttaatataccaaagttattcacttaacagatttgacccaagttacataagctgaattcaatagatgagattgcatttatctttttattaatatcctgacgtttctttttggaatcaagtatgtaaatacatttctcactgagaaatttaaaaaaataatatgtcagggtagcatacaaaacagaaactcaggaagaactgtctaacatgccactatggttattttcaggattgtggtaggattattactacaataaccttgtcgatcatcctaggtaatttgatttaggtgtttatccctcagctgacgcttgtgtgtacttccatcctattctaactttcacaatcttgaaacctctacttttcaatttaaaacttgacctttttcacaatagtcttctaaatattaatccttttaaaaattattaatgtatgcattctaccatgtcttgttgcccttctgtcatttattatttcaatgatcactgccttatctgtttattattccattactaaccactctcaggaactgatccaaatttgaactttttaaaaaaatagaatttttttttactacaaatataccattctcatgaatagaaaactatttttaaaaaattaaaagtacctgaatcccatcaactagaaataacagctgctcacatcatggagaatattctctcaggatttttttaggtgtatcagtagttttaagaaaagtaaattgggtcaaaatgtgtattctatgttgcagcctgcattttgcacttaacagtttaccatgaatgtttttccatgtcatttagcttattttcaatttgatagttaatggctataaaaaattttatttgtaaatatatggtaccataaaccaaaacgtttatgttttgctgggagatcattttagatgtatctttgtgcctatctgtgaaaatttccttagaattcttaaagtaaatttgctgaattggatgtaaaagtttaaaagacagtagatacacattgttaaattgttcttcagaaaagtgattctgtttacttcctctgaaaatacctctttccctgtacctcacccaagtgtgtattaccattttaaaatttttactaaatataatttaattcattcttcattttttaattagggattttttttttttttttttagtttttatatttttagagacatggtctcactctgtcactcaggctggagtgcagtggcacgatcatagttcactgcagccttgaactcaggtgatctccctctttggcctcccaaagtgctgggattacaggcatgagacactacatcaagcctgggaaatttttaaacatgcataaaagtagagggtaaaatgacaccccttaccaaccctcactcagcttcaataaacatcaacattctgctggtcttttcatctttactaccctacacacatttgccctttttttctttcctagaatattttaaggcaaattccgcatgtgcttttacatctctgtgtctctctctagtaagaatgttcttttcagcaaaatcacagaattagccattactcctttattacctaatacccagactgtttaatttttctagttgcttcaagtgtctgtttacaatttatttgtttgaattcatttctaagctaagacctaggtttctcttaatctgttgctgttctccctcttttgttgttgttctttttttttgagacagagtcttgcactgttgcccagtctggagtgcaatggcatgaccttggcttactgcagcctccacctcccgggttcaagagattctcctgccccagcctcctgagtagctgggataccaggcgcgtaccaccatgcctggctaattttcttctatttttagtagagttggggtttcaccatgttggccaggctggtctcgaactcctgaccttaagtgatctgcccaccttggcctcccacagtgctgggattacaggcgtgagccaccgcacccagcccctcctttgtttttaagtgtcattttatttgctaaagaaatatgcagtatcctttgtgctatacagtttcccacgttttggatcttgctggtcatgaacttgtaatgtcattgagcttgttccattatctgctgtttattctataaactgggagttagttctagagacatgggtagatttggttctgtctttttattgagagtatttcataggtaggtggtggtgtgtactttctgttgctttacattgagagacatgtagtgtctgatttttccacttttactgatgttaagattaattagcgaggtcaggtggtatcaccctgatctcaccattctaaagttcctcattaatcttttgcctaggggttttggcaaccatttatgtttgttgcctggatcttttaattattaggggttgcaaaatggtgactttctaattctaccattcctcctgcatttgttacctgggattcttttataaagaattttctctcatcaagtctttgattaccctgaaatatagtctcatccagagaaagctagataaattcttatttcctttgcactgttgtgaaatgaaaatttggtgcccaagcaatctctgaaagagactaatgagtatgtttttgtttgtttgtatttgttttgttttgctttgtatttgagcattgtaaggatatagtaaaaaccaaaccaaggtgtgtttttctttctctttctcactgagttaacacttctgacaccagatatgttgtgggtatttccccacataccaagtaagcaatcagttctgcagaggattctccatcagagaccagcaggatgtctgctgatttaattcaattctgacactacctggagatagcattagatctcacaagtttagggctcagtctcacaagaccagtccccgctacttgagatgccaatcataagccccgggttgtctgtgcttctgacagactggctataaatcagggttcccacaacccccttcttgggttcaattaatttgctagcacttaggactctgggaagcatgataaatgggtaaatgtaaatataaatttacatttattataaaggatattacaaaggatagagacgaaaagccagatggaagagaggtgtagggcaaggtatgggagaaggactgcagagcttccatgcccactctgatctgatcacgccacccaccttccaggaatctccatgtgctcagctttccagaaactcccagaactcagctattttgggtttttatggaagctttgttatgcaggcataattgattaaatcattgcgcgttgatttattggctcaacttttagctcctctgcccttctgaggttgggggatgggactgtaaattctaaccctctaatctaatctaatggttggtttccctggcaaccaagtcctatcccaaggctctctaggaacctccagccaccaattttctcattatcatacagaagacattcttatcactcaagagatttcagggattttaagagctatgtttctggaaacggatgaagatcaaatatttttttcacaatatcacaagcatcattatgaattcatggattcttacatacatgtcagccctctgtatccatggattcaaccaaatatttgaaaatatttggaaaaaatgggtggttgcaactgtactgaacatgtccacactttttgttcttgtcattattccctgaacaatgtagcgtaactatttacatagcatttccattatattaggtattagaagtagtctagggatgatgtaaaacaggaggattgcgtaggttatatgcaagtactacgtcattttatctaaacaacttgagcactcatggattttggtaccaccaggccaggtcctggacccagtcctccagtgatactgagggacagtcatgtgtcacttaacaatggggatgcattctgagaaatgcatcactagttaattttatcgttgtgcaaatatagagtgtacttacacgaacctagctagtgtagcctatacctcggctatatgttatagcctattgctactaggctacaaacttctacagcttgttattgtattgaataccgtactcagctgtaacacagtggtaattatgtgtatatctaaacctatctaaacatagaaaaagcacataaaaatatggtataaaagatttttaaatggtacgcttgtctagggcacttcccatgaatggaacttgcaggactggaagttgctgtgggtgagtctgtgagtgagtggttagtgctgagtgaatgtgaaggcctgggacattgctgtacaccactgtaaacttttataaacaagtacacttaggctgcactaaatttattttcaaaattttttttcaatagtaaattaaccttcgtttatggtaacttttttagtttataaacttttatgttttagcttttcaactattttgtagtaacacttagcttaaaatacaaacacattgtagagctatacaaaaatattttctttatatattatccttattctataagctgttttctatttttaaatttttttttaactttttaaacgtttttgttaaaaactaagacaaacatacacattagcctacgcctacacagggtcaggatcatcaatatcactgtcttccacctccacatcttgtcccattggaaggtcttcagggccattaacaggcatggaactgtcatctcctatgataacgatgcctgtacttcctgaaggacacacctaatgctgttttacagttaacttttttttttaataagtaggagtacatgctaaagtaaggatgaaaagtatagtaaatatgtagaccagtaacatagttgtttgttatcactatcaagtgttatgtaccgtacgtaattgtattactatacttttatacaactggaagtgcagtaggtttattcacactagtttcactacaaaaacatgagtaatggattgtgctacagtgttgtaatgactaggacatcactaggtgataggaatttgtcagcgatataatcttatgggaccaccatggtatacacagtctgtcattggccaagaagttatgatgtgtcacatgatcatatttttgttcattgcaatcattcttttttgttgattgctcagaattttccttttttggccattggtaatcattcctttgtctttttgactagatcctggtgatctttcgtaactttttttttccaggcagaacaaggatgtcctaaacttattttgtacatttcttgacccagaaatgaaagtcagctatttctccaaggaacccagattgcttttggtgggttagataatataagcaccagtgatctgcattgctaaattttcattacttataggcctttttggtgcattgggttaggaaatgtatctttcataccgataacttctagttcaaattaaatattacaggcaagataacaaaaatcagattgacaaattgaacttacaagaatcagagatcctaacctagtatcaagcttggcaaatattttcaaagataaaattatcataagacgtgagcggggtgtagagaagtctgtgactgccagagctgctctcgggtcgtttctttcctcaattagactgtgctccagcccagagttcaacactcaaggcctctaagtaatgcctgtagagtgtcaattccacgaaagaaagctgtttccgacatgagacatcactggtttcttctttgataattacatagtgtatgtgatattttctagagagtcatgcctacatacatcccaggtttttgtataatgagcaatgtagacagatcaagttcatcctgctgaagcatttcataagcaaggactcttccaatagtaaataccttcagtgtgtttgccagaggtctctctttaccatatttctaaggtgatttgatgatgcttggagagaggtatctgctcactctgttttgggccagtgagaagaaagaacagactacaggtctgctgcgagccctttccaccttatcagagtttttgcttcttttgtgttatctcctttcactggtgctgaaaatcttagtacctaatgacattaatgttattttgttttatcataataaatatgcatatatagtttcaaaataacagtggcccttaccactaactgtgggaccacagaatgcagcccaagattcctttatggtccttcttattcttggtatatattttgctagggacttgtaataatacagtgttttaaaatcactaataattctctggttatatcaacaactttataaacatttagattaatttgtaccagttttcacttttcaataatgatttagatttgtttttaatttattcttaatatatgaaaatgcttaagtacttatgcatatatatgacataaattgcatatatatggctctgtgtacagttccagctacactagaactgggttatgtgacagttactttgaaacttttgccctttgtcagcctctcaatcatgttgctaccatattaatctttctcaaactcaaatttgaccccataactcccctgtttacaggcctccattacttccctgtttgcctgagagatgaagtatgcagtccttagcatgattcacagagccttcagtgtaccccttccctaagcagcctttttcagcaatacaaaacccttttctgttctccaaacacaacataacagtttatgcccctgggcctttgtacagattctcctcactgtttaggatgccttcctcattcctttgcccaaatccactgtcacaaatttctgttcattcttaaaaataaatgtaggttttctcctttctgaagtggttcctgaaccaaagtgtttactatatgtaagagcttcctatctggccttcttccttttgctctttcccccactatcagttccctaacagcagccagactgagactacttcctgctcagaaacctcctttggcttccggtcctactcaaagtaaaatccaaacttcttctatttacaaggcctgacatcaggcccttcctgtctctttaactaactcttctgccactcccctttaggtgactcccaccaaacttgccctcttgctatttcttgaatatttcacacttattcccagttgtgttggggaaccccaagaccacaccctcaggtgcagtaatttggtaggaagtgttcctagtaaatctatgctgactcaaaggactcagtgtagagttgtgttcacagctataatttgtcatagtggaagactagaaggcaaaatcagcaaaggaaaagtatggaatgaagtgtaggggaaaccagatgtaagctttcaagggtcctctcccggaggagtcacacggagtgcttaaatccagcagcaacaagttaagataacacatgtgaaatgttttccacccaggtagcttattagagaactagagtttttattgggggctggttaagttggcagtctcttcctggcatgtaccaaacttgcagaaggaaagcaggtgttcaacattgtacagtttgggtgagccactcttatctgtaggatggtgagaactctccagaaatctaaatttccagatgctaaccaagggccaaccttggaagccagccttctcaaagagagaagtttatgtctgtttttttaactcttctctgcacagtctactccctaggtcattggccaaggcatctttatagcagagttaccaataagacccagatagtagtgagaccagcctgcaatattgattttaggtatgccttttaggaggcctggacttagccagttaaaacaattcccatttatcataatggtctatcttagaaaaacaataggcttcctccctaagttttaacctttctaatctttttacctttttttttttttttttttttagacgaagtctcgctcttgtcccccaggttggagtgcagtggcatgatctctgctcactgcaaccttcgcctcctgggttcaagcgattctcctgcctcagtctcccaagcagctgggattacaggcacctgccaccacacccagctaatttttatatttttagtagagatggggtttcaccaggttggccaggctggtctcgaactcctgacctcaggtgatccacccacctcggcctcccaaagtgctgggattacaggagtgagccaccgcacccggcctaccttttttaaaacacattttacctattatttgtttttgtacgtggtcttaagtttctgtattaactttttttttttttaatcagctgcagcacaactgtggcctagtaagtggaagctgacctaaaagctttccagggctgagtcagtctcatgagagtcagagtacaagaagttccgtcccaagccgggcgcagtggctcatgcctgtaatcccagcattttgggaggccaaggcaggtggatcacttgaggccaggagttcaagaccagcctggccaatattgcaaaaccccatctctggtaagaatataaaaaattagctaggtatggtggcatgagaatcgcttgagcctgggagacagaggctgcagtgagccaagatcatgccacagcactccagcctaggtgacagagtgagactgtctcaaaaaaaaagaagaagaagttcagtcccagagggtacacatggtaaccctggaagcaaaccatcaattacagatactctgtttccaaaactcaaaagagttcaaattccagtcctctcactggcagcaaaaagcaaggaagttgtgtcccactaaacatttttttgcagcttcccctgatcaggattattcctctggtatttacaaaattacaggtgtttaacattttattttaatttttacaatacatctagatgcaatagccacaaaatataaagctattttaaaaatattcttctttttcttttttctccctactgcagtttactcagcctcctagcagtaaattcagtgtttgcactgttaacattacagctgccagggaagatcctggaatgcagtggaggaagggaggtgggggaggatattgtagcaagagcagcagccaggctgaaaaaaaactgctggattgttacctcccccagtttttttgtttgttttctggtttatctaaaattttgttccagaccagatttaactttttaaagagagcagttcaaacttgtaacgtttttggtttggcccatccttgggaatttgggggtcctttctcttcccatctagaagagagaacaaaaactacaggcctcacctgcaatacactgccttttccctcattttagccagcaggactaaaagcagtcaggggcatccagcaagccagctttcctggagctggatcttttactttcagattctatggctctcaacaaacagcagctcagctactgcttcatactgtggatgactccatgaccactcaggccccagagattcatcatattctgccctttagccttcctcttcttaacgctttcaccatatatcagtgagtcagggtcattctagcaaatcccacttctaatgcatctgtgtcagggaacccctaaaccatccccaggtttaatgatttggtagggggatttgacatatagttgccttcacagctatgatttattacagcaaaaggggacaaagcaaaatcagcacaggtgcaaggtacatgggggggaagtctggaggaaacaaggtagaagcttccaagggtcctctccctcagaactgatgcaggatcacttaattaccccagcggcaaattgtaacaacgcatgtgaaatgttgtctaccagggaggcttgttagagacccagtgcctggagtttttattgaaaactagtttgtaatcaccctctgctagcatgtaccaaaactgtagaatcccagaagaaaaatgggtagtattgcgtgtaaaccacatgtttgtacggtttgggctccgtacacttttataagttagaatggtggcgtgtccggaatttgttccttctaatgcccagacttcagggttgattccctccttaagcaggggacaacaaatgggtaacttgttccccatattcatgtagataatagctccagctttggctaatatatcgctccctaataagggtcctgggacttccaggcataacaaaggcatgtgaaaagagcaaagtctcccaattacaactgaggaggtgggagaaatacctggttacaggctgtcccaggattcctcggttggtaacggtccttgaggacagttgtctgggacaggaggttaacactgagaaggccacagtgtccaggaggaagtcaatttcctggccctcaatggttaaacgtacccggggctcggtgagggtgatgacgtgagctggcgcttggcctgggcaccctcagtcctgttgttggatcatctggttgggggcttctggtccagagaacctttgtcctctggggcagtgcaccttccagtgattgcctcggcatagtggacatgggcgagggggcagcttgtttctcactggacaattttttaaagtgtccttgcaaaccacactgataacaagccccaccaggtgattggcctcctctattttctgtcctctttgaaccaccaaggtttgtttgtctggagggccatgactaaggctgcagcctttctctgatctcacttttcctttttggcctgttcctcttggtccctattatagaacaccaaggttgccaggtttattaatgcctccagattttgttcggggcccagggctcacttttggagctttcttctgatatctgcggctgattgggtaataaacttaccctttagaatcaattgaccctcaagtgagtcaggtgacaggggaatatgttctcttaaggcctcttgaggaaggcagaaggattttcttcctttccctgagttatggtggacatcattgaataattcatgggctttttcctaattttccttagtccttctagaacacaggtcagcagatgtttatgactccagtccccatgatctgagtctagatcccagtggggatccatactggggacggcttgctgactggtagggaatttgtccctttcttcagctgtcagtctgtcatttacttgactaagataccaggtgtctccaaactctcaggctgcagctaaagctgcattcttttcattaaaggccagggtttgatctaacaataacataacatctctccaagtgagatcgaaggtttgccctagaccctgtaggacatctgtatacctatcaggatcatctgaaagcttccccaggtctgccttgatctgctttaaatcagagagggaggaggggacatgtacccaggttgggccaaattcccctcccctacagcttgaaggggacataaccaatagcctgtgggggtttgtggtcctttggagatttctttgcttgtttccttctgggcaggggagattagaggaggcttatcattaataggaaggggagctatagggaggctaggatatggaggtaagctaagaggtcctcctgtgggatgtaaattgtaagctttgcatagttgtggattctccttcaatgaaaagaaagcttggacataaggtatttcactccatttgccttccctcttacagaaaaggtcaagctgcaagatagtattgtaattgatacttccctcaggtgaccatttttccccatcagagagaatattggggccaggccatagtgcagaaaaaaatgagctgcctctttttcagggtttatgggtcaaattggtcccaatggcttaggatgcatttcaagggtgagcctattgatgcctgtttcccatctgaaagacagaaccgcccgcggttttggtttgtttctctccctgcccaagaacccacaagggtccctggaccctccggatcagaatagttgcgctcactgacaaagcagcagaaacactagttttcctcctagaccacaaagaggaccaaggaagattggatttagtggcccttaccaacgcattctcaaaatcctgcactcttgtctgtcctcctagaccccaaagaggactgagaaaaatcggatttagtgacccttaacaacgcattcttgaaaagctgttagagtcctaagcattctcctgttagtagtgggattttacccatgtcctataaagatgttatgccctgaaaatgaagtggagggccataccctaagggaggggagggatctccagagttggaagagtgatgccttttgtcctcacttgaataggaaggatatcatttctgaggctccccatatcctagcttcaggaatagcttttgttaggcctgctaccctgaggagggatcctaaaattacagataagttagtcccccgccccgatggggctttgggcaaaaattgtgtctttctggttagtgagcccaggtgcctaaagaagggaatagagtcctggagtatatactagaaatcattctcataggagaaactagaaaagcaccagagacagggagttgttttagaagcaggactagcctcagagaagagaggcgagaggaagtttgtctgacaagcattaggacccaggaagcaagggtcaggatagataggatagatgggcgagtctcacttgggcgacgtgacttcgagagttccgctcatggccacagggtcaacaaacttgtcgggaccccggagctgaatggctttcctctctgtccacccttggctcagccgagaagtacagggaaagcggaagctggttccaggcaaaccaacgctcccaattccgaagagttgggggtggttagagagctctttcccagaaagcctgacatccgtgtctttagtccggcggccgcgctagtcgcttttaactggctgacaggtgccagtatttagcccccgaattctaaggaaaagtaggacagaatagcaaacgaaaggggtctgatggtactcactgcttgctgattgtcccttcgtgggtgccaaaatgtgtccagaatttattccttctggtgggttcttggtctcgctgacttcaagaatgaagccacggactctcgcggtgagtgttacagttcttaaggtggcgcgtctggagttgtttgttcctcctgtgggttcgtggtctcactgacttcaggagtgaagccgcagaccttcgcagtgagtgttagagctcataaaggtagtgcggacccaaagagtgagcagcaacaagatttattgtgaagagcgaaagaacaaagctttcacagtgtggaaggggacccgagggggttgccactgctggctcaggtggccagcttttattcccttatttggccctgcccatgtcctgctaattggtccattttacggagcgctgattggtccattttacagagagctgattggtgcgtttacaaacctttagctagacacagagcactgattggtgcgttcttacagagtgctgattggtgcatgtacaaactttcagctagacacagagtgctgattggtgtgtttacaatcctttagctagacagaaaagttctccaagtccccacctgacccagaagcccagctggcttcacctctcagtgggaacccttccaaaatctaagtttgtagatagcagccgagggccacatgataagcggtctttcaaaagataactagtcaggcttgctgtgttaactgttttctgcatatcatctcaataaacatttgttgatcatgaatgaataattaaaacgccatcataaggagaatgattacattgtggtattccctattatagaatacccatagccattttaaaaggaacaggttttgttgtaaataaaaaaatccatcagacaatggcagaaccagaagtttatttggctcatgtaactagaactcacagataggcagttcaggacttgtgccatcagagactccagctctccctttcttcctgttcagctcctcagtagactggcttcatcctcatgtttgttccatgtggtcaaatctgatagtggctgcaccttcagggcctgggtcctcaggaagaagtgttgcctgcatcagaagagcagaagcattttcagaagacactaggagaattctgaaactatttctcctggggaagtggttcagaatcagtaatgaggcagtctgccctgtctgccacctacaagaatgtcaatgatatgttaagcaaaaaaatgtcctattgaaaagtagttcagttagtatgatcctgtattagtcacagttctccagagaaacagaaccaaaggccatttgcttggagaatttcttcctcatagggttcagtcttcattctgctcagtccttcaactgattgggtgaggtctgtccacatcatggaggataatctgctttactcaaagtccaccaatttaaataatttcatccaaaaatcaccttcatagaaacttccagaacaatgatatactcaatatctgggcactatggcccagccaggttgacacacaaaattaaaccatcacaaatcctttatgtgaaaagaagccatttgtaaaaataagtttgcaaatgaaaaaggtccagaacttcttttttcagtaactgtcattacctcttgacagaaataacttgaagtgataggtaaagataactgtcatttttctttaattttgtatactttcttactgtttgtctctgcagtaaacacatccttatagccttaaaaaagaaaaatagagtaattggcatcttgatctatttcaaatggcacaaaaggaactgagtttaaactgactacatcttgcttaaaattgggttctgaagcaagtttgttgagcaacagaatggcatttctacttcattgttgcttaaatggggatggcagggaaggaacgacctttaacctagcaatcatattaaacagaagatagaagaataggcagttgcctgcaacaggtcctgactttcatgaaaaggctttttttgttattgtttctttggtttgatttggttttacaagcaaattatttgtgcaaggaaactcctttaggagaccatccttgtagatcccagccacaccacagctttgaaaactcacgtgtctttaaagccgttgtttagagaaacccactgttcttaaacagcagctttcctgagcaagttttactctggatggtttttgacagtgcctgtcacctgattaatatgaagtttgccactttattctggtcacatgggccagtgattgtgctgctttctctttgtattttaaaatgattagttgcttctcacagaaagagctgagctttgtatgaaccctgatcttaacgttttgttcattctgcatatgaatacatcttctgaaaaatacattttaatctgtaaagtggtggctttcttcgtatagcgtgtgtttatttacaaagatagtttctagaccttatttagcagttttcaacttttggtgaaagcagtctgtagcaaattacataccattggtattttccccaaaatattactatagcatattcccagacaacagtaaaatattgcctgtatcatttggcctatatcacttactttaagtcaggtactttgtttcctttaaaccatatgtactggtgctttgttcatagtccttgggagattttttttggtgacaatcgtttgcttggttgagcttttatgttggtgtttactaaaattgatgaacactatgacagttgtcttgaggttggtagctttttaacattaaataattgtttctcagctatctttgactacaggtatatttgattcatatgctacttagtactctatgtttggaagtaccagattgtttcagagagacagcctaatagataattttcttatttaaatatcacctatgtaaactgtaaaagttcttaaaatgagaaatttgcaaagctaaattatgtttatctgtatagatcaagaaattaacttttagttttctgttttgattttacaatttaaagtgagaaaaagatgtgcttatattcccctagcctttaattgtctatatatatatatatagagagagagagagagagagagagagagagagagagagagagatcagcattctagctatgtttaccttttttgtcttggattctttccttcaatgttcaagcatactgtaatatcttatctgttaaaaacaaaaatcttgtatcccttagtccccctccagctaccatcccactcctctactcccctttatagcataattctttgaaatcgttctctataatcactgatttccctttctctcttcctgttctgtaatccagctccagcaaggcttgagcctcctccagactgctaaatctactcttctccactagtcacattctaattgctgaatacctggtcggttcctgatcctcatcttaacccctcactagtgttcttttccctgaagatactttcttcagttggctgctggttccttagaatttgtctgatcttgaaacatgagcttgcctcaggactcagcctttgatcctcttccctggcttcactactctctagggacctttaattccttccgtgttgacgatgccccggttttcgtttaatggctgccccatagtgtatttacccagtttcctatcagtagatctttgagttcatttggttttatgtttttaaaattaggatactgtacaagtattctcttgtacataatctctttgtgtgtttatgggagcatttttttaagtaaacatcctggaagtggaaaagctggatctgaagatatggacctttacattttaacagatattaccaaatgccccctcttgaagagattgtattaatccatacacttgctaagagtatgaaagggcctatttacccatcttctggccgacgctgcatattttccgttttattttgctttttactttttcttactttcttgactgattttaattgactttgcaagagcagatttctactagttgaagtgtaaagcattctgttcattattacaataagttctgtactataaatatcttcctcttgaggtctaaatagattgggatactgtgtcattaattgtagagccaaaatatgattcattacctagaaaatgtgaatttttacatgaagctgcagaactgagaacccatttttccctttcacggtgtcagatttgatactggttatcgctaatttaaattgcataacctgtcagcttcattataccagagcagtgattaccttgtttttaaaattgatactcttctggtggaggtttttaaaaggatggctttgaaattattgcaggatttctccatagaaagaaaattaactgaaattaagactattgtgaggagtttctgtttgagataatcgatttgaaactagagagttccaatcagtaacttttggaagattttagaacaagtttaaaaggtagtaacactttccatattgtgatttcccttggagaaggtagctgagagaaacaaattttcttcactaatgaattattttgacaggttgcagttttgactaaattgatgaagcaagtgcctcctgaggattcttcctccttatgtcagtgctgaatcagcagtagatgaaaaccttttgttgtcaaattttttttactctctccagtttcttttctgtggtatagttcatcacatgaaagggaattatttcatatatttgaaacatttagaaaatacaagttttggcaaactggaattcctatgataagttatttgtttttaagacaaagatttctattatcatagaagtgttaattcttttaaaccatcatttgctatttaatttgaaattcaggtttacaaactgcagttctacagacgctttctcggctcactgcaacctccgcctcccaggttcaagtgatcctcctgccttagcctccccagtagctgagactacaggcatccactgccacacccagctaattttttgaatttttagtagagacagagtttcaccatgttgcccaggctggtctcaaactcctgggttcaagtgatctgcccacctcagcctcccaaagtgctgggaattacaggcgtgagccaccgtgcctggctctcagacactgtctttctaaagcagcggcagatttggatctagtagcagtgtatagggatgtcctttccaaattctgtagtcagaatgactcctctgaagttgttgctaaaggattccttgcctatacattgcattagagatcctttctttaaaacatagacaaagcaaaggtaaaaaaagttatttgcctcttattaccaggatgatgagtgacatttacctggtgtaaaccatttgaaattcattttgtctttcatagcttattgaaagtatgttttaatttagtattgtaggatatgtcttttttcacactggaaagatagaagggatactttctagccttcagagcagggatgcccataataatagcagctgtcatctcttgaactcttattacctaaagtgataggcaccataatgagtcctttacatgtattatctcagtcagtctttgcaaacaataaggactgttattcctatttggagataaggatgttatctctaagtaatcttaagagattaaataatttgctcaaagtgcacagctaataagtggtaggatttgcatcaaatgttctgaccccggaatctatacccttcatgaccgagctctgctacccaattaaattctccatgtaaaagcaaccagtggaagttgacatgggctcatacctactgtgtacagttttaggcttagtcctggacctctggtcttctcatatacctctcatgcagcattcttaggcatacccttgaattcaagtgttatctgtgtactggagaatttttttttttttttttagctgtaactgaaacatgtttaagacattttcacttattttttgtttttgctgttttttttgtgtgggttttttctttgttttttgtttgtttgtttttttaatagccaccttgaatgtagcagtacctacccagtaacctactcctcctttagaattctgtatcttagtaagggcagccatctatgtacccctaacgcacctgggtatcttccttgactcaactttcctcttatccacacatctagaaagtggtaccatatctacctccttagaatcacttgagtacatccacatcttccattccattcccctctctgggctaccattgcttctcagatgactgttaacaacctttaaactggtcaccttgcatccagccttactttttacatactttccactcttttaataaaatgtgagcatgtcactcctatgcaaaacttttcagtgagtttccattgttctcaggataaaagttcaaactccttaagacatgtaaggtcttccccagtctgtcttcctcatgctgctttagcctcttctgttgtccactttgccattcatttgattcttgtcaccttagcaccaatctgtttgagtactcctacccaccccacccatgagcctttcattcactgctactcctgcacgcccttcaggttcaattgaaacctcagttcctgagaggggaggctttcctttccatagcatccatcacacatttgcttagtatctctcttcctggctaggcagtaagttgtgtgtagcaaagatctctgatgcacctcatttctagcacctaccataattttcaacacctaagagatactcataaataatttatagaataaattacagatgcagtctctacccttaacaagctcaaagtccaatgggaactagagtatggtaaagaagtaacttccatacatgtgataagtactctaataaaatgccacaggattgcagaggagtgtgtgagtggttagctttgccttggggggagcatttgccctttgtaactctgtattactgaagaaattgacttacagcattcagaaacaaggagagctgtgctgagcagtagaattgattcacttgcattttgccttattttttgcttactttttgggcaggagttttacagtagacctttaatattctaaggttatatatcaggaacttcagaaagtctaacctagacacagatgctatgtagtcagctagccatgctcactaaattgactaaaccaagtcctccctaatcaaaatcattgctagcccttttatgttcccagttacaaatcaggcatcatgaatctttgcttcaaattccaacagccaaaattgatggcattgaatccatgaataccagaggtgttgtttcatgtttagatttttatttcttgtcattccagctttgaccgccattgaaggcacagcacatggggagccctgccacttcccttttcttttcctagataaggagtatgatgaatgtacatcagatgggagggaagatggcagactgtggtgtgctacaacctatgactacaaagcagatgaaaagtggggcttttgtgaaagtaagtattgctcagtaggaggcagatctgcattgctttatgtctagggcaatgtttttaaggcctttttctagccatcctttttccacattggtcagaaatggccagcattgctgatgtcattacagccttaaagagtggacttaagagtgggaaacttggtgtatttattttcaggctgtcactcaagtcacactcacgttttatttagagatggttttccattggtatacacaggttgttttgttaaacccttcaggcagcctgataaattattaaacataaaacattttgggggcagtaaaggaaactgggccattatggagaaggttaatagtgattagaagaaaaataaataactttttaaaaatacttaaggtgaaatatgctataccaaggtaacatttgacaaatacagtgtatttaaccatctttagtataaatgtcattatagagatgctgactctaaggaaagctattttcaggaaaaacttcctaactatgaaaaaacaacagaaaatcttgaacataatcccttaaataccaatttttaaaaaaataatggctgttatagaatatttgggcaatcctaaaagagcacatcaaatatagtccatctttagatgtaggccagcgtgactgggtactccagttaatgcaccagaatttttttatattataagaagaatttgcttctgtttctataaatactggttctaatgaaatgtttgttttgatgagttcttacagtagcaaaataacttttgaaaaatctataacagttctatgattttcagtgttatatcagtttgaaaaattggtgaacttgaacattaaatcagtttctatatttaataaaaattttttactaacttgtattatatagttaatcaaatattttcaccttgtaaagatatacagtatttccaatagagctaaagtgtcctttgatcccaacagtatttttctgactactgtgttcgtatgtcttgaccttattttagctgaccttggcatattgtgttagtccattctcacactgctgtaaggaaatacctgagactgggaaatttattaataaaggaggcttaattggctcacagttctgcaagctgtacaggaagcatgatgctggcatctgcttggcttcttgggaggcctcaggaaacttaccatatgagatgcagccgtctcatatggtgggagcaggaacgagagagatgatgaggagcaaggtgccacatactttcaaatgaccagatctcgtgagaacttactatcacaagaacagcaccaaggggatggtgctaagccattcatgaaaaaccacccctatgatctagtcgcctctcaccaggccttacaggtgagagagattgtaatcaccagggattacaattcagtgtgagatttggtggggacactgatccaaaccatatcacatataatctgaaattttagttgaattatatttaaaaagttagcattaccaacagaaaagtaccctctaagagtggcttggtattggtatttctataaaaaagtgatttcagtgaattttatatatgtgtgtatatatatatatattttttttaagttttatcttgtgtcatgtaaaggccacacttaagtgtttttagaatcatgtttgggaatagtgaaagatcattcattttgtttgtatgactgcccaaaagaaagaatactaatggttgataattgatagaattaaaatccatttaaatgcatctgacgttttgtttttagctgaagaagaggctgctaagagacggcagatgcaggaagcagaaatgatgtatcaaactggaatgaaaatccttaatggaagcaataagaaaagccaaaaaagagagtaggtagcactgctaagtccacttttcccccatgacaggccattactgagacaaatagcaactacattctttaaaaagtgcactgccagagacgcagaagatttttttaagttccattacaaaaaaatgtaatataacttacgggcattagtagcattgcttttaccacactttagttaaggtaaaattgttatactgattacagtaacaaacaatgagtaaaatggcaatgattgactcaagttgtagtagtttctaagaaccaagcatgcatatactatttagaattcaaaatgacataaaacaaaaagaattgttgtcaagtacgttttttgtttttgctttgtaatttttgactggaatttaggaatttgtgcttggaaaaaacagaacaagtgattatctcgtaacatcttatgtccttttaatttcagctgacatttttatagtctgcaaagatttaaaaagaaaattgcaacagttattattagatcgtatactggacaccatcatattctcttattgcaaatcggttaactttttttaatagaagtttttaaaattactgttagtataattagactatttcaagatattaggataacagggagaactggtaccttatatgaaaaacaaaatagctagccaatctgggcagcatagtgcaaccctgtctctaaaaaaaatttaaaaattagccaggcatgatggtgcacactgtggtccctgctacttgggaggctgaggtaggaggatcacttgaacttggaaggtagagaggctgcagtgagctgtgatcacaccactgcactccagcctgggcaacagaggaagaccttgtctcaaaaaaaaattaaaaaaagggatgttttttacatgtataagtaatatgactgaatagaaataagattatcagagggggtggctaggcgtggtggctcacgcctgtaatcccaacactttgggaggctgaggtgaccaggagttcgagatcagcctgaccaacatggtgaaaccccgtctctactaaaaatacaaaattagccaggcacggtggcgcacgcctgtaatctcagctacttgggaggctgagggaggagaattgcttgaacctgggaggtggaggttgcaatgaaccgagattatgccattgcactccagccgggacaacaagagtgaaactccatctcaaaaagattatcaaaggggttttgtaacataaggaaattatttatgttgcgttttagtagatcaaaaaaacttaatggcagtttcaaaacattactaatttggtttttaattgtttacatttgaagagcatatcggtatctccaaaaggcagcaagcatgaaccataccaaagccctggagagagtgtcatatgctcttttatttggtgattacttgccacagaatatccaggcagcgagagagatgtttgagaagctgactgaggaaggctctcccaagggacagactgtaagtacattctcagtgaagaatctctctgcatgtaacacttgttagttttaaaagcagtttactctctatgtcctgacttcttttaaaaagtcagactggaagataaataccaattttgtggctgaccattttatcagtcttcttggatagtctttttccttagtctgggaacatttatggtcatggaagacatttttgcagttgtgccttgctacaattacatttgtactcttccaaattagatctgtagagaatgaaatatgaagataattactttttatctgaaattactcaccattgcatttttccaaagttcagatgttgcagctcatgttaatcttggtgtttttttaaaaaagtattttattacagaagcagtacatgtccattataggaaactagaaatacaaactaacaaaactaagaagtacacatcacatatgtaccacccaaatatgagtaataatatattagtgtgcatgcatatctttctgtaatagatctttctctttgtgtatatatacacgatatttttattaaaatgagatatcactgtctattgttctggaacttcaccttttcatcccagcacattttaagtcatataatacccacactatgttcatatgatgttgaacccaaaaattttctttatacctgttttgtccaaaccagtattcaatccaggactctaccttacatttggttgttatctagtataccccaatgccttttttgtctatattagagatagggccagtttttctgcagaatatcctacctcagtttgttttcatggtggcttttagtttgtttcttcatcacctgtatttcctgtcaataggatgtcacagctaaaggctgatgaatacaagtaaaatatttttggctagactacattacaagggatgttctgtattctacattgtatcacatcagttgctaacatatctggttgtttccccattaataatgctaagattgacacctggatttagggggccatcatatttatttaaaattccttcaataattcaagcttattcaagctgcgagacttgcttaaagataagtgaaatatctaatcacaagggaagtctgttttcaaactatataaacaataacaggagtcataacagttgttttcttagaactgaatacctaacaattctgcagctctttcctcggtattttattataagcagattatatcttaattgttcccctttgttttcaaaggtttttctcttctttgcgtgaatcagtttatataaaaacatatatattcttattttcagaggtattctgctctgaagaacggttttactttataaggcatcagttccctctaatattagaaccttacaaagccacagcactttatatgttgcaaagcaccctctccatgaaaattagttctagttgatgcaacagacaaaacccgcaaatcacagtggcttaacactacagagagttatttcttgctcatgctagatttgatgtagctctcctgttggcatcactcttttctgagtagtgactcctggtcatgggctgtttctattatgtagctacactgattgctacacggggcttccatgccatgatgaagtgagaaaagagagcctcaggattcattagggtgttttcaggcttacatccctgacagccataccccaggcatgtgattctacggagaggctggaaaacgtagaggagctcatgatttcagtgagcactccagtctctgccacacctgcctttgtcatgttagcttatactttcctatcatcaaggatgatccatagaaggcaaagggttgaaaaggttgaacttcaccaatgcattatttcttccatttttgtgtttttatttttagaaaatcatgtgtgctctaacattgtagagcagcctttttcccttgacctcttcagcttgaccccttgctcctcctttttatatctgagatagtttatcttggtaattcatatcttgtctgttttcatagtgtattcctttctgcatatatagagaaatatgctgatgtacctatagcgggagttgtcttcataatggctgttcataaagataaagtcatgtttacatgtattcagctttgtctttctagttagtattaaattgtcctcaagctaaactttttgtcttgtttaaagttacatttggctgggcgtggtggctcatgcctgtaatcccagtactttgggaggccaaggcaggcagatcacaaggtcaagagttcacaaccagcctggccaacatggtgaaaccccgtctctactaaaaatacaaaaaggaaattagctgggcatggtggcggcacctgtaatcccaactactcgggaggctgaggcaggagaattgcttgaatctgggaggcagaggctgcagtgagccgagattgtaccactggtctccagcctaggcgacagagcaagactctgtctcggaaaaaataaattaataaaaataaagttacatttaattgtggccgggtacagtggcttacccctgtaatctcagcagtttgggaggctgaggcgggtggatcacttgaggtcaatagttcaagaccagcctggctgacatggtgaaaccctgtctctaccaaaaagtacaaaaactagctgggcgtggtggcatacgcctctacatagtcccagctacttgggaggctgaggtgggagaaccacttgaacccagtgggcgaaggttgcagtgagccaggatcgtgccattgcactccagcctggatgacagagtgataccctgtctcaaaaaaaaaaaaaaaaaaaagccacaaataaataaaattttttttaaaataatgctacatttaatttaattgtgtaatgtgtaaaactctgaatgcttttccaaggctctttaatccatgtttgtacatacttgaattcaaatcttttagcatttaaagactcttgcattttttcatagtatataaaactgtgtctgtctgtgtctgtcttggataaaccttcaccaaagcaagatttcttacttttatcatctatttcaggctcttggctttctgtatgcctctggacttggtgttaattcaagtcaggcaaaggtaatactattaaaactttattgcatattacaatttgaattgaataaatgcgtgcctatgttcagttaaacatgttttgttctttcacaggctcttgtatattatacatttggagctcttgggggcaatctaatagcccacatggttttggtaagtagactttagtggaaggctaataatattaacatcagaagaatttgtggtttatagcggccacaactttttcagctttcatgatccagatttgcttgtattaagaccaaatattcagttgaacttccttcaaattcttgttaatggatataacacatggaatctacatgtaaatgaaagttggtggagtccacaatttttctttaaaatgattagtttggctgattgcccctaaaaagagagatctgataaatggctctttttaaattttctctgagttggaattgtcagaatcattttttacattagattatcataattttaaaaatttttctttagtttttcaaaattttgtaaatggtggctatagaaaaacaacatgaaatattatacaatattttgcaacaatgccctaagaattgttaaaattcatggagttatttgtgcagaatgactccagagagctctactttctgttttttacttttcatgattggctgtcttcccatttattctggtcatttattgctagtgacactgtgcctgcttccagtagtctcattttccctattttgctaatttgttactttttctttgctaatttggaagattaactcatttttaataaaattatgtctaagattaaaactggttctaagcaaaagcccttataatttttctcttatgagtaaaatgcacacacttcaaaaataaagtttatgacatctattttgattgctctaggaactatattatttatttccttgctcttagctatggccttcttgttgaagttgctgaatccattacctcaaaacctaacacttagcataaataaggtgttagtgtacttggatcaaatgacagcaaaattctgggtatgcttagctttatttgttccacgaagaatgacactgaagtacatgaaactgctgcctcctcacgtgaagttgttttacagggttacagatactgggctggcatcggcgtcctccagagttgtgaatctgccctgactcactatcgtcttgttgccaatcatggtatctatgtttccccttttaccttttaggaaaaaaaaataaatggaattaactttaaacatttctatttttattgttctatttgaagtattataaatggctcttttatgtggactcatctttaaactagttgaggttcagaagtacttttttctttatataattttgctttaggttctatttacgttgtgaaaaaagttcaatttattaatagattactgatttgcgatctatatagactactgtaaaaacagcttcctttaacaatgtgttcgtcaacgtttggcagctggaattgtacttctctctctctggaacaattcttctgattttcctccaccttattgttttatccctctatttcagttgctagtgatatctcgctaacaggaggctcagtagtacagagaatacggctgcctgatgaagtggaaaatccaggaatgaacagtggaatgctagaagaagatttgattcaatattaccagttcctagctgaaaaaggtgatgtacaagcacaggtacgtgtttgaacatctcaccaaatatctttactgcattgtatattttaatctgtgggggacgggagcaagcacttatatctgtaagttacattttcattgccctgagcaattatgaactacatattagaatcacctgagccccttaaaaaaaaaaaccaagagtctcacactctcaggagattccatttgggttagtgtgggatggggcctaggcattgagggttcctaaaactgtccaggtgactctcccgtgtactgcccctaaaaaaatcactgcttgaacagagcagcattaacaccgatgatgaaggctgttactggagtcaccaatgatgaaaactgtcactttctctaaacaagaagtccctggaatatttgcaatatcagatgctcttcagagctatttaccattcgtgtttctttggctcatctaaaatcataatttcttcaaggtcaagaacagaagtaagctcgtttaatggaagttgtataatgtccgtcaaagtaccatgtgtgcacacacaggtttcgtggcttcttttgatattaaaataaaaagaactttaacatttatatttttttccactaagtttgcaattatttctaatttaggacatgtacagatgagcattagatacttattaagaacagttggttttaagactagcagtggagtcttaaggaaaaaaaaacgtagtgaaacgtagatctaaatgttagctgatagaaattataataaacttgttcaattaaacatcttatttttacattattgtaaaatttagtttacttaaaattttctgttttacttgctttctgtgtatcttgcttgttgtgtttactcttctctcctttcttgcccttttttggttgagtgctttttcctgttgcatctcttcccctctgccagcatgatgctactcttgtagtggttatctagcgatcacaacatgcatccttgacttaccaaagtctggtacgatgagcacttttaccatttccaggacagcacagagatctcagagtattctgtgtgtgtttgattttatatattttggtaccatgagatactgttgttttgtacagtccatattaatttacatttattttcaaatttaccttttcattgctttttatttatttttttattttttattttttgagacagatccttgctctgttgcccagtgccactatctcagctcgctgcaacctccgcttcccgggttcaagcgattcttgtgccttaacctccccaagtagctgggaatgcaggcatgcaccaccacacccagctaatttttgtatttttagtggagatggagtttcaccatgttggccaggctgatcttgaactcctggtctaagtgatcccacccacctcagcctcccaaaggctgggattacaggcattagccaccacacctagccagctctttatttcttactgtatctcccagcttctagtaagtttccttttttctgaagagcacccatttgtgtttcctttagagcaggttcactggggacaaattcagttttttttttgtttttgtttttgttttttgagacggagtctcgctctcgcccaggctggagtgcagtggtgcaatctcggctcactgcaagccccgcctcccaggttcatgccattctcctgcctcagcctcccgagtagctgggactacaggcacccgctaccatgcccggctaatttttttgtatttttagtagagacagggtttcaccatgttatccaggatggtctcaatctcctgacctcgtgatctgcccgcctcggcctcccaaagtgctgggattacaggcgtgaggcaccgcgcccggcccaaattcagttttaatttatgtgaaaatgcctttatttcacttccactttagcaggatactttgtgtttttgttttttgttttgtttattcatttgtttgttttttaagacaaagtcttgctctgtcacccaggatggagtgcagtggcacgatctcggcacaccttaacctctgcctcccaggttcaagcaattctcctgcctcacctaccaagtatttgggattacagatgtccatcaccacacccagctaatttttgtatttttagtagagatgggatttcaccatgttagccaggctggtcttgaactcctgaccttagatgatccacccacctcagcttccaaaagtgctgggattacaggcatgagcccatcgtgcctagcccgttttttgtttttttgagaaaacatctctctctgtcgcccaggctggagtgcagcagcacaatcacagctcactgcagcctcgacctctccaggctcaggtgatcctcccacctcagcctctcaagtagcagggactacaggcgtatgctaccacgcccggctaatttttctatttttttgtggagacaggattttgcgatgttgcccaagttgttcttcaactcctgggctcaagtgattcacccatgacctcccaaagtgttgaggttacaggcgtgagccaccgcacctggccgcaaatggtactttgcaattacaagtacacgtttttacttttcaaaatttttaggttaattaaagtagaatagcattttcaggagttaagactaaatctttttgttttttgagtcatgaacagaagccattttacgaccaaatcatttcttgttggtctgattttaattgtgtgccagatggtaccacttacttttgccttgtttgtgatcattttcaggttggtcttggacaactgcacctgcacggagggcgtggagtagaacagaatcatcaggtaactaccctgttcctagggctttgcatctcagttttagcaggaaatgatgttcccaatgtatttcttgctaagtcaataccagtatcaaacttctgtcatttaaacacccatcacaaatgagctttcaagatgtaaccaacccctaagaaagctgaagaatacaaatattagtacctactatgtgccattcactgctaggcattcaccatgcaatattggacaaaatagttttggtctttgaccttttggagctttaactttaataggagtattagatattttttaaatgatcacaccaaatataaattgtggttattcttacaaaggagatttaaaagatacaataattggttaatgggtaggaggtaccgcttgccagggaagacttctgtaaagagaagtagaaaacatttaagttgaccctggagataaggtccttccaggccaaaaagaacggtatgtgcataggcccagagacaggaaggaatatggctagtctgcccatactacaggaatatgactggtctgcccatagtacatgaaacagaactgagattaagcagtgcctgatcacatcagcatatccctgcagcacttcaaggagctacaaagatcagcatgttcagatttgaaaacaatggctttggctgcagtatagaaagtgaattagaagaccccaagaataaaatcaggcagatcagggaggggaatattcgagaagttcaggtgagagagaatgtggcttggactagaactacggtaaaggaagatagtagtggattcaagatgtatttggtggtaaatgtaacaggccttagggatggatgggatataagtgaaggggagctgatatcttaagcaaccagtaagatggtattgccatttgcttaaattgagttgctggaggagaagcaagttgaggtcaagaagagaagattttagggatatgttcaggcattggatagtgtgttcagaggtagtcgaatagactggattgaagctgaaaatataaatttaggagttgccatcatctcgatggtgtgtgaatctatgggaatagatgagattgcttagagaatgcaaagtgagaatggagtccaaaactgagccctgaagaactttaatgttcagaagtcaactgatagaaaaataaccagcaaaggagacttaggtggtacaggtagacttaggatggaaaccaggagagtgtgacatcttgttagccaagctaagagtctgtcgagaaggaagccatgatggactctgccaaatgttgcagagaaaggtggagtgaggtgagctgaaatttagattggcagtatgaagatcatcactggccttgatgagctgtctttttgatgtagtgtatggaagccaattaagactagattgcagagtgaattgaagtgcatgtcaccaatttattcgagaagcttggctgtgaaggaaagtagctaacagaacagtcatcattggagagaaattgggggtctaaaggagatacatatcttgtgtgttttggtttgagttttattttttatttattttatttatttatttatttattttgagacagggttcactctgttacccaagctggagtgcagtggcgcagtctcggctcactgcaacctccacctcctgggttcaagcaattgtcctgcgtcagcctcctgagtagctgggaatacaggtgcatgccaccatgtcaggctaatttttgtatttttagtagagacggagtttcactatattggccaggctggtctcgaactcctgacctcaagtgattcgcccgtcttggcctcccaaagtgcagggattacaggtgagagccaccgtgccctgctgagttttattttttgatgatgagattatagaatgtgattgagggggaactggttccaaaagagggagaagttaagtcagcaaggaaaataagaggaataaccaatggtacaaggtccttaacaaaaatgggctgcaatacagttgagagtggtgatgatgaatttctgctgatgctagtgtgtttacttaagtgatttttaagtagggtcaagaatttttctctaaacagtacaagaggaatgtattcctttagacaacaatgaaaatatgctccatgtcttggaaagacttctagtttttcctttctcccaggttatcattagagaaatagaccaaagaagtcaagctgctcttaaatgtcttttaagcaggctgatgttcgctttgcctgtaagtaacaggaggcttgttgtaccttacgtttaggcagcacaagaaatttctttgcatctataattatgcagatgacttaatgataaatggtactgttatttggtaaaataaaacttctagatgtactgatttctctttcaaaatattggcaactgggtattcttgtttttaaagcactgtaatataacaagattttttaaatgttcctgaaataattattttggctgaaagtcaaaagcagattctgttaaaaactaattattttaataaattcttttctcatagagagcatttgactacttcaatttagcagcaaatgctggcaattcacatgccatggcctttttgggaaaggtactgtacatcctgtgaatgttttatgtaatagcaagaggtgtttgcataattagcatgtattgtgttcaggatctacaatttaccaaaaataaattggaaataagatttctagtgcaagactattatatcttaaagtgctgttctgaggcattttcttaggcaacttaaatataacatagtgtttgcagccaggcgcggtggctcacgcctgtaatcccagcactttgggaggctgaggcaggtggatcaggaggtcaggagatggagaccatcctggctaacacggtgaaaccccatctgtactaaaaatacaaaaaattagccgggtgtggtggtgggcgcctgtagtcccagctacgtgggaggctgaggcttacagtaagtcgagaccacgccactgcactccagcctgggcgacagagcaagactccatctaaaaaaaaaaaaatagtgtttgctcatcagtatgttaattcttcattgaaattagctctcactgagctcttactttttgtgtattgtatgcaataatgaggaatgtattcttgatgctgtgcggttttttgctaagactctcacagttgtctgtttccttccatgctgaatagaggcaattagagtttgttgaaatttatctgcagagtttttaattgtcttaaatgtgatagccatgacccacctcttctcattgtagctgtgttctcaatcaagggaacagaacatttaagtctagaaactttataaataaattccatatgtcatggaagaatctcaaaactttttcattattttgaaacatagtataaatcaatgggtattttcacttataactaaatcctaaagtaaggaagtttagatggaatatatcacaaaggtttttacaatagggaaatttcatcatgatttgcctcatgatcatactagtaattggggtgtggtaactacatttaaatattccagctgttccatagcatagaacttggtatttccctctgtttttgttaagcatttaagaacgtttcattcctcctcttttggttcttgctctgaattactgtcattgtctttaaaaactattttttacatttattgtttctttaacatatatgtgaataaagacagtcttgaccattctgtttttctttctcttggccctttatcattctccatacctgatgctctaattgtttagtgtttaaaccctcttcaagtaaaccttttagttacttcgtttcctgaacttaagacccacttgtgatcttatcctggggaaagtagtggtagaggagaaagaagaatgaatgccgcaagcagcttcccctttccttgttgaatcactgatctgatcctaagcaacttactaaccatttgacttccctggaatagagtgagaaaaatgattcatgttgggcttaaagatttcttctgagactaatatatgagctgattttatgtattcatgtttataaataagtcataaatttgagatggcaacagagtatataattactaaaatgtttgcttttaagagtttgcttttaattcttttgttttttttgtttgtttgttttgttttgatatgaggtcttgctttgtggcccagtctggagtgaagtagcaagctgtcagttcactgcagctgcagcctcctgggcccaagcaattctgctgcctcagcctcctgagtagctgggattacaggcacacgccaccacgcctggctaatttttgtatttttagtagagacagggttttgccatattggccaggctggtcttgaactcctgacatcgggtgatccacccaccttggcctcccaaagtgctgggattacaggcatgagccactgtacccggcctttgcttttaattctaaaatatcctgtggggaattctaaattttttggaaagatttaatgagatctgacaaaactcaaaggagatgagaaaggagaaaaatgtaattggagagagggttacagctcttactgaaattgggatctgttttccagatgtattcggaaggaagtgacattgtacctcagagtaatgagacagctctccactactttaagaaagctgctgacatggtaaggctttgtctcagtgtactgaaatgtgtaccatattactaatattttaataaatgaatttgttatattaaagggttaatcataaccaactcatgctatacattattgaaactgcatattaagtatgattcatgtgaatgtattaattaaacaaagccctcccgataaaaggcaatttttttagggaccaagttgttgatttttaattgtgaagtttcactgagaagtttcctaatcggggaaatactgatttttagtaatggaacttgaacttatataatctaccctatttgtatcacaacatgaaatttaaaagcttacataatagggtacttttgataatcatagtacataatttaggctttctttggctcagaaaactgcatatgagtacctgaaatcttgtatgtcttcagtatgtacacttacctctctgtcaactattatacatgttactgtagttccagatgtcacttgaatgcttcccaaaggaatgctatgacaatctttttaaagatgtcttctgtccctctgagtttaggcaaattctagatttttttctttctagtcccaaaacagtgattttctttgttccatgacactccaataatcctaagtatatctttgtcacctgatagcagcattgctattattacatgattatgctattattacaaggtgttccatgatatcctccctctttattggagtgggatgttaccagtgaaaaactgcaaaaatgtgacctgcctttcattttgatgaaatacattagtcatgctttatgtcataaattcatggtacagatggtcataaagtaagtcaacaaaatgtaattctaaatgaatttactatttactctttttcagcaaattacccaaagcccccagatgtctaaaagtcaatattatgtttagtctgatgagaagaagaaagttttgttttgaattgaaaagtactaagacatgtttttgaatatgcttataaatgatttattttgcagttatttattcttgcctatttttgaatgaattcttttcactcttttgtctgatttctctgctttgcagggcaacccagttggacagagtgggcttggaatggcctacctctatgggagaggagttcaagttgtaagtgttcagtctgacattctctctttaatgagcagtcagctggagaggtagggacatgttccttaattagcttccagtcagcccaggtggggctgttccattgtaagcaaagctgaacctctttctgttgtctgagtttgtctcactaccaccccatacccgacagacaccatctcaactgtcttagaacagctctgtgtctggcactttctcccagaggtatggagttgtttcttgttcttccatctctgctctctaccccacgtcctctaaccatctctcaggacttaaacatctccttgcctgcttttttactcaatcctgacaaaatgcataactgccttccattgaggaggaggaaagctttctgttctgccctttaccccttctagctaccacctgtcttctcccagcccttcactcagagtcaaactaagctgctgtcattcactcttgagttcttagcaatcgaacttctgcttcatggaactatactctctgtacagatcaccagtaacctcctaaatgtcggtccaattgacattttttggttctacctcacttgacctctcgcttccctggtgttctgtctgtgtctgggtttccttggccattgcatctcatccttctgtgcagcctcctcatgttggatgtccctggattcacgttgcagtttccttctctatttgatctttccaagtaatatgtgcttttaatttgaggctgaaactaagagctaggtttaagagctaggtttttaatatctataggtattctctaacacaaaagacagtaatgtgttctcattttgcggccttctagtcattctaggacactaaaattcagtagtaacctttattttaacttttcttcttggatacatatgacctttgaagtataatagtcatagtgtttggtaaggtacacggaataaatgaataaggagataattttctttctttaattttaggaaaattgaggtttaaaaagggttgattggttagcagagaagattgactgtttcttaattcctggtctgatgttctactagtttttatgctttctgagagcagcatacaaattgtttcacaaaaactctatttacttttcttcaccaccttaaatattaatccccctatgacttaatgtatattattatctattataagaattagaaagtggtctttttaatggctctttgggaatatttttttatatgctttgttcatttttttaaataaatctcttaacttttgagtatgtctgccttttgagctttctcatcatatgacatctttttctacagaattatgatctagcccttaagtatttccagaaagctgctgaacaaggctgggtggatgggcagctacagcttggttccatgtactatagtaagtaacactggaattaatgatggatacaccaagatctaaattaagctgttttctactagatggcattatgatgtggaaatgggtgctatcaaattctggctggttaaatgttctcccagttcaatgatttgtacatcttgtttttcattgtaaattatattaatctgtatcagtgtgttagcttgtattagattcacatatttactcagtaagaattctttcattagagttttattcttcatatataagccttctctgatacttagctaaatcttaagtctattatctcgtgtgatttttttttttcttacagatggcattggagtcaagagagattataaacaggccttgaagtattttaatttagcttctcagggaggccatatcttggctttctataacctagctcagatgcatgccagtggcaccggcgtgatgcgatcatgtcacactgcagtggaggtaaggtctttcctaccagcttgtgtgtagggagttgatttgcccagcaggaaagtctgcgctttcaattctggtttttttgtatgttttcttctgtagttctagactcagcctacctagctttgatatactgagggaagaccgaggggtctgtgtgtaattaccatacttatttattcagtgtctccctattacaatcaactgtataaggggagatactggtgtctgcagtatctctagcacctaagacagtatctgataataatcagcatcaaaaaaatatataagctgagcacaatggcacgtgcctatagtcccagctacttaggaggttgaggtggatgaaggcttgagcccaggagtttgagaccaacctggacaacatagaaagaacctatctcttaaaaaaaaaaaaaaaagaaagaaagaaaaagaagttgaatgaatgttccaaaaaggaatgctaatatctcctaattggaaattgtctcttagctctctcttagacttggcactttagagtgacattgataaatgcttagcaaagtttctaaatctctgtgctttagtttactcacttgtcaaatggggcttttaacaggacttacctcctagggtggttcctcatgaatctcatgggaagattaagaatggtaatatacataaatcattacaacagtgcccgggcagagtaaatggtcatttttgtagtacaataattgtgtactgttttttttttttataaacctgttgacttctaaagagtaagtgaaaactttaaataagtatctcaaacttttatgtctgttcaagaaagctgccagaaattgaaggagcaagcttaatagtcatgtgtaaccaaagtgcataagtgattttctggtatatctttcttattttcttctactgatattttttttccccacctcacacagttgtttaagaatgtatgtgaacgaggccgttggtctgaaaggcttatgactgcctataacagctataaagatggcgattacaatgctgcagtgatccagtacctcctcctggctgaacagggctatgaagtggcacaaagcaatgcagcctttattcttgatcagagtaaggttcattttagtcctgccttaggtttagaatgtacgagttcacaccagtaaactgtttaatgtattcaaaaagaaaagctactaggaaacattctttattattgtaactggaactgaacacacaggcttaagttattaatattttactttagccatcaaagttagttttataacgagttgactgtagaaatggatttgacattcattttaaaattaagcactttgcataaatgtatttttcaaaatacagtggatacaaaaatgccattttcccaacactgtagaagagtgactcagtagtctcatgactggttctatagatacaacatgtttcacaaagtagtgccctcttgcatccagtgattgctttgaactcactattttagttcagtaattaatttcagtatttgttttaatttttatatcctaattcttgtttaacttatgcttcacctatccttcctactttgcaaatgaaaattaagtctagtgccttttcttaaatgcctgatttgtatttcatttcttttcctgtaggagaagcaagcattgtaggtgagaatgaaacttatcccagagctttgctacattggaacagggccgcctctcaaggtaagtgattaattctaagataagagtttcacccagggacctccctatgttgtttatctcccatgaacattaaatcatgaagccgagtactgtggctcacgcctgtaaccctagcactttcggaagccaaggcaggaggatcacttgaggtcaggagttcgaaaccgaaaccagcctggccagcatagtaaaaccctgtctctactaaaaaaaaaaaaaacaaaaaaaattagctgggcatggtggcaggctcctgtaatcccagctactcaggaggctgaggcaggagaatcgcttgaacctgggaggcagaggttacagtgagccaagattatgccactgcactccagcctgggcgacagagcgagactccttctcaaaacaataaaataattaattaagcagagatactgtgacttaatttgtttgcatattattggtatttattcttaacagaagtttctagagccagagtttctaaattgggttgtaaagtctttgtactacacatttccatcaagctatgattcactctttgttttccagtttgaggccagtatactgtgtgaaatgggaattaaatagaatgtatgatagaacattagtctgaaacctaagagacttttctttttcttttgaatatttattttttatacatgttcctttcaacattctctgcctgttcccttctccaaacctaaatggtcaagctggactattttaaaatgtaaatgacattataaagtagagcctgatcatttacataggagtgtttgtgaaagaagggagtacaggttgagtatcccttatctgaaatgcttaggaccagagtgtttcagatttcagatgtttttgttttttttgtttgtgtttggcatatttgcacatacgtattgtttgagcatccttaatctgaaatctgaaatgctcctgtgagcgtttcctttgagcatgacctttgaatgtcatttcaggttttggagcatttcagatttcagctttttgaattagggatattaaacctgtccccctacacacacaccaacttggttttacctctctgtattccaaagccttctgcagaagagctacacttctagtttaaatttttactggactttataacttggctgaaaggatttgttacaaagtttgtgtactatgaattaaaattctttgttttatgtaagcatgtcaatgggaggagaaaaaagtttgatctgttttaaacatactttatttattggcagttctgcatttaacttttgtttaaggctatactgtggctagaattaagctcggagactaccatttctatgggtttggcaccgatgtagattatgaaactgcatttattcattaccgtctggcttctgagcagcaacacagtgcacaagctatgtttaatctgggatatatgcatgagaaaggactgggcattaaacaggtgagtgtggcttccaaacacgtttgaatcacataattgtgattggggaaaatacttgcatttgtatagaaaatagactttccttgacattcagttggatttcaggccactaaattatgggactgatttgtaatatttcagaagactgcccttccatctctcatcttccagcacgcacagatactgctatccacgctgttttatttagggattaagctgaagacagactcatgaaaatggaagtgcagtgcttcctctgctgataactacttgtttgagaaactatctgtccatcgtcagccaaattctatttttttcaaattattttgaaatgaattaaatgtattctactgataaatttatttctgattcttacacttgcctaatgaagtctgtcattctctggactcatgacttaaggtttttcctgtgtgccctcaaaagaatttggaaaaactacagacccccttgtacatttttaagttggcatttaaattttttcttaagtttcaaagggtctaagttccagctattttaagcattaacatttttaaataaaattaattacccttaaaatatccaatagaatctaaataacaataatttaatacccacttaccattattaattttttagaaatatacaagcaagttttttaattgaaagctaggtcttttcctgtttccctaaatttatgttttctaccacgacttctgtagaatgtaatactaatgtattgtttttaatgcttaggtcttttattgattactgtatcatacttacctgaaacaaacaagtgtataaattcattttgaattttattaccagtgatctaagtgttaagaaaaattcatgagatattactagtcacagttggtcagttaatgcattgttgatcaaatctacaaaatacattttgataaaactttgctttttgtattattaattgaaaatgcatcttttaatgagataaatggagtatttgttaaaaattgagatttcacattaattctgtttttcatttttttaaatgtatgactagaatgtcatgtatgtgaaaatgggaagaatttcactatagcatggtcacttaattcttcaaactaccttaagagttagatgccaaaaatcagagtgacttgtcattagaaattatttttaatgatcaatctcctgactacttgataggtccctcttcagttgtgttgaaagcaaagaattggaaaccagagacttgtgaaagcatgcattccctgacactgggacctttcacttttcttattttctaggaagagtacaaaaggctttaccaagacttatgaaataggctgttaattatactccttcctgtgtcacttagaggccctttgttgacctaaggattgagggaaagttgttcatttttgctaatgcggtattttcttgacaaaatgctgctgctttgttcacatttggacattttcttttaatttcagtatgtaaatatttatattttaaacttaccttaatacttagaatattactaatattagatacttaaatatagttcagtcaaggctcaggagcagcaaactcagtacattcaacttctggaagatctctgccacttaatgtagtaactgaagcttctctttattgtcaaaccagtcatccagtgtcccaaattagacttagcttctatcagaaaggctgacggatttttgtcgttttttttaaatggagatggggtaccactatgttgcttaggcttgtctcaaacccctggggacttaagcgccttggcctccaaaagtgctgggattgcaggtatgagcccctgcacccagctgactttatttttaattcaagtgaagtttaacatgactaatataaagatcacatgtaagttatggctttcatggagtacatctagtaataatttactgactgtagtcaaaattaaaatgatataactaatctgtttttataatagcttataaaacaagaaaatgtgttctaatttaatttgtaatacactgtatagctaataatagaaattcttgtgaataaagaatatgataaaaggcatagtactcctttgataagagtagggggagggaacttttgtttagcttttgagaataaataatcatttatgaaaataaataatcatgtatgaaaatcagtaactccattactttttttttttttcggtgagatggagtctcactctgttgcccaggctggagtgcagtggcacaatcttggctctctgcaacctccgccctctgggttcaagcgattctcctgcctcagcctcccgagtagctgggattacaggcgcctgccaccacgcccggctaatttttgtatttttagtagagacggggtttcaccatcttggccaggctggtcttgaactcctgacctcatgagccacctgcctcggtctcccaaagtgctgggattacaggcgtgagccactgcacgcggtcccattactttttttataagacatcgtgatcaccttttctactttttttcttttgaggtttaaaatattcatgctactaaaaacaatcccccatttaatatagttaggaaaatattaaatatgaggattgactataattggaaaaaatcatcatattatttgataagttttaattacatactagtgaatctatttaattaccctagtgaatcatccaatgtatgaatcacatgaagtttgatccatgatcttgaaaaatatagcagtcgaaaaaaccatttgagttatatttttctaaaaactcagacactaaccatactgttagcattatttgaagatgctcttctttttaaataatgacacaccctaaggacaagaataaggaatagctgaaaataactgcttgtatttaaatatgtttggagggggagtcatttttggtctttaacctttcttcctcatatctcatggaattctttcttaagagtttggtattctttgataatagggagtagaagtgagatttttaagtgaaaattcccaccatcccattctattacatatctgaattcagaacactccagcctgggccaaaattaagaatgcctggtttcaccctttacagaaatatatctaacacagggaaacacaagatgccctaataagggtttataattagtcaataaaggagccttctccagaaccagtatttcaaggtatctcttccggtggtagcccctgaggtttctacaccccagggcaatgcacttgaggaaagagtggggtagatctcttccggtggtagcccctgaggtttttacaccccaagacaatgcactggaggaaagagtggggtagataagggctgtgccttcctttagcaaagcgaagcagagaaacgttgctgtgcatacaggcctattctcagcagatccctttcaggaaaaagcacatatggaagctgcagaactgcagaatcgagtcccttaacatgtccatgcaagtacctcttgtaaaatctgtttctttttttggaaacagggtctcactctgtcacccaggctagagttcagtggcaccatctcagctcactgcaacctctgcctcctgggttcaagcagtcctcccactcagcctcccaagtagctgggactacaggcaggcgccaccacacccagctaatttggcttattttttgtagagacagtttatgttgcccaggttggtcttgaactcctggcctcaagtgatcctcctgcctcgctctcccaaagtgttgggattataagaatgagcccactttgggaggctgaggcgggcggattacgaggtcaggagatcgagaccatcctggcgaacacggtgaaaccccgtctctactaaaaatacaaaaaattagccgggcgaggtggcaggcacctgtagtcccagctactcgggaagctgaggcaggagaatggcgtgaaccctggggggcggagcctgcagtgagccgagatcgcgccactgcactccagcctgggtgacagcaagactctgtctcaaaaaaaaaataaaaaagaatgagccaccgtgcctgtcatctgttgtaaaatcttgagtgtttctaccccactttgaagatcactgtccagaactgaaaccagacgttgctaatactgattgaagttttaagtagcaaaaaattagtgtgagtttcagaagtcgcccttggaaatctctaggttaacagtgttaatgcatagatatatggctgtatgcagcatatctacacagcaaattagatgttatgttgggggaaaatgagttttttaattaagtttttcaatattaagcagttagataattaaacgaattttacccaagtaaagcttggcatttttgtttaggtgagggaaactcattttaaaatgaaaacctcaaaggtaaaataaattcgtctaatatgttcactaaatatttttacttattttgacaagaaatgcatttttgtttcttacctgtattataggatattcaccttgcgaaacgtttttatgacatggcagctgaagccagcccagatgcacaagttccagtcttcctagccctctgcaaattgggcgtcgtctatttcttgcagtacatacgggaaacaaacgtaagtggtccgtacctcttttcattaaaatataaatgatggaaggtctgtcctggaggtttgtttttcaaaagttgagaagcacagggaagagtggtcctgcaggtatcgggtgtgttcccttctcctcagctcaggtacccgaggaccttatcaggggagggataaatgcaggcataaagcagctactgcagtttttaggtagcgtttgacacttcctgacgctaaagcatttttcatggaggcagatgttttctggtttagggaaaactgagactaactcatggcagtttgaaacagtatttaattcagtaaacattaaatcagatgactcaaaccagtcccttaaaaagaaaaggaaaaaaaaaagaagaatctgagaacctccccaggttgttgtacttcagattcttccgatagtgaagcattaagttgaaaacaccacccaaattttcttctctaaaaatagcgtgaattatttaaataggctaatggaagaacctatataggaagtgggttacccattttcttcaaaattaccaactttagttggcaatactggtatgtaggtactcttgggttctgccagctttatattttgtttccagtactatagttcctagaatggattaactggtagagcatttcactctgaaagccctaagatgttcagagcccttgtttctaacataggcttattcaggacaaggaaagtttcttcaggaccagaaaaggatgatgtttcacccttttgttaatgtctttcagttttagattcaagaatgggctttccctcatgtgtgtcacaggtataaatgtagtccatgctgctccagcatcagtgaaaagaaatggacttgtctagtccatgcagctgaagtcctccacagatagggttccagagcactggtcttgtgggactctggcctcccagtcgcttccacatgtgtaatgtcagttgctataattgcatggtagcatgagtcaggtgtgctgtaaccgctgccaattgaaacaatctttgttcctttaattaaaagctgatcgtgtggcagcctcctctttctctttcagtaccatttcagacctttatctctcacaatttttattactaactgttggttatagtctaggacttcatcttataatatgctgtactgggtatattgtatctttgctgttttttttaatacagaagtataaagaagacagtaaaaacgccccataatcctaccacctagttattccaactaaaaagaaaaagagagtataagactaataagtatcgatcataagaaagtcaaacagtacagaagaacacaaatctcccatcccagattcttccccagagaacacaattagtggtttcttgtcattttttttccagaaaaatttagcacctgtacctacaaacgtgttatagagatctttcaaatgtaattttatataaaattataccccatgtttactttcttaatgggtaagtataataaaagtcagaaagtatcagtgatactaaaacaattaaaatattataggctaagaacataactttcaggtttcaattcagatgttaaatattttgtgttttagttaaatcctaattgagaagcattattcattcagctattaaatgtttgaattcctgctattttcaattacatgggaattgtgaaatggccccactgtcatggaacagagctttccagctggtgtgctgtcactgccagtaggttcgctgtgccaagatactaatttctccccttggctcaccactgtttttttcttttttctttcctgagacagagtcttgctctgtcgcccaggctggagtgcagtggcacagtctcggctcaccgcaacctccacctcctgggttcaggcaattcttgtgcctcagcctccagaatagctgggattacatgcacccgccaccatgcctggttaatttttgtatttttagtagagatgggatttcaccgtgttggccaggctggtcttgaactcctggcctcaagtgatacactcacctcggcctcccaaagtgctgggattacaaggcctgagcccccgcgcctggccccagtgttgttttgttttgttttgttttccaaatattttctgtgaaaaatgattaaaattagcgtattggattactggtggaaagaacactgtcagacattttatattaagtgtcagctattataaattagtagcttaattcctcagacacattattttgagcttcagttgaaggcttttaaaaccgctttaaacacacacacacacacacacacacacacacacattgcaaaacgtttttaaaacaaattattttaatttctgtacttacttctggtgatgtaactttcccagttccttgcctgacattttagtgataataatggtttctatattattttcattaagattcgagatatgttcacccaacttgatatggaccagcttttgggacctgagtgggacctttacctcatgaccatcattgcgctgctgttgggaacagtcatagcttacaggcaaaggcagcaccaagacatgcctgcacccaggcctccagggccacggccagctccaccccagcaggaggggccaccagagcagcagccaccacagtaataggcactgggtccagccttgatcagtgacagcgaaggaagttatctgctgggaacacttgcatttgatttaggaccttggatcagtggtcacctcccagaagaggcacggcacaaggaagcattgaattcctaaagctgcttagaatctgatgcctttattttcagggataagtaactcttacctaaactgagctgaatgtttgtttcagtgccatatggaataacaactttcagtggcttttttttttcttttctggaaacatatgtgagacactcagagtaatgtctactgtatccagctatctttcttggatccttttggtcattatttcagtgtgcataagttcttaatgtcaaccatctttaaggtattgtgcatcgacactaaaaactgatcagtgtaaaaaggaaaacccagttgcaagtttaaacgtgttcgaaagtctgaaaatagaacttgccttttaagttaaaaaaaaaaaaagctatcttgaaaatgttttggaactgcgataactgagaaactcttaccagtccacatgcaattagacatattcagcatatttgttattttaaaagggagggttgggaggtttcttattggtgattgtcacacggtataccatactcctctccttcaaagaatgaaaggccttgttaaggagttttttgtgagctttacttctttggaatggaatatacttatgcaaaaccttgtgaactgactccttgcactaacgcgagtttgccccacctactctgtaatttgcttgtttgttttgaatatacagagccttgatccagaagccagaggatggactaagtgggagaaattagaaaacaaaacgaactctggttggggtactacgatcacagacacagacatacttttcctaaagttgaagcatttgttcccaggatttattttactttgcatttctttttgcacaaagaacacatcaccttcctgaattctttaaatatgaaatatcattgccagggtatggcttacagtgactactattataatactaaaactcagagaatcaaagatggattaaactcagtggttgatgaaagccaaaacctgtttgtactgttctatactattcaggtatctttttatttctgatagttttatattataatagaaagccagccactgcttagctatcatagtcaccattttctcactgttaacattaggaaaatcaaggctactatgcttcaggattgtctggttaaatagtatgggaaaaaaactgaagagtttcacataattacacacgtgaaataattaaagcttaaactgaatttgtatttcattttattgtcagatggtggtgttcaccagcctgtatcttgtctgagactgcattcgtatctgagcaggttttctatgcctactgatgtcagtatgtttatactaaccttcatgcttttttcccagaatccctcatctgccagaaaacttgaaaagtttattgcttgtagagttgtactgctttgatttttgaagttggggtagtagttagaactagatttaactagtctataatgaacatgaaggcttttatatatgaagttgtatacctttttgtgtttagagaattatgggaaacctggtaagcaaaactttcctcccagataattgcttccaaattcgaagagttagtcaccaagagagccatatgtatgaaagcgtatctgtgaaaggtaggaaacttaccccccctaagtgtaatgttgctttaggcaactcttgtaaatagtgagacttgtttggtctcttacatgtagagatttgagtgcagttggtacagtactttggtgtctccaccactgtcccttctccccgcttcaaaataagtgtaatccacggtagcagccacacttcctttagaaggaactgttataatttatttaaaagttgaaaaaccacccaagatgactaccaactttcacttttttcttctgccatccaccctcatttttcctttagcaagatttttatatctaactttccttccctccattgagtacgtgctttgagaaaacatttcttaaaacagtgtgtgccacctaaggctggatgggaaagtgcagtcttgttgttcatataaaaacacacttcttattagtttaccacttgcctttttctattgttaatgttctgaatttccttttcttggcttgtttctacttcattttaccctgggtcacttgctgccagcagtttgtgaatggtgtctttcaaataacttagttcttatggcttcacttaaagactgtctcaaaaatactttgctctcttcttcttttttgttcatgggacatggtacctaagcaaataggagttgggtttggtttttctcctaaaataatgctcaatacttacctaatcaaatggcatccatttgaataaaatgacaataactaaagctagttaatgtcagtgacattaaactaactccaggattcaggagttttaatgttagaatttagatttaacagatagagtgtggcttcatttgtccatggtagcccatctctcctaagaccttttctagtctgtcttcctgccttcgaacttgatgacagtaaaaccctgtttagtattctcttgtgcatttggtttgttggttagccgactgtcttgaaactattcattttgcttctagttttattttacagaggtagcattggtgggtttttttttttttttctgtctctgtgtttgaagtttcagtttctgttttctaggtaaggcttatttttgattagcagtcaatggcaaagaaaaagtaaatcaaagatgacttcttttcaaaatgtattgtttagcacttaactcagatgaatttataaattattaatcttgatactaaggatttgttacttttttgcatattaggttaatttttaccttacatgtgagagtcttaccactaagccattctgtctctgtactgttgggaagttttggaaacccctgccagtgatctggtgatgatctgatgatttatttaaagagccgttgatgcctccaggaaacttaagtattttattaatatatatataggaatttttttttattttgctttgtctttctctcccttcttttatcctcatgttcattcttcaaaccagtgttttggaagtatgcatgcaggcctataaatgaaaaacacaattctttatgtgtatagcatgtgtattaatgtctaactacatacgcaaaaacttcctttacagaggttcggactaacatttcacatgcacatttcaaaacaagatgtgtcatgaaaacagcccctttacctgccaagacaagcagggctatatttcagtgacagctgatatttgttttgaaagtgaatctcataatatatatatgtattacacattattatgactagaagtatgtaagaaatgatcagaacaaaagaaaatttctattttcatgcaaatatttttcatcagtcatcactctcaaatataaattaaaatataacactcctgaatgcctgaggcacgatctggattttaaatgtgtggtattcattgaaaagaagctctccacccacttggtatttcaagaaaatttaaaacgatcccaaggaaagatgatttgtatgttaaagtgactgcacaagtaaaagtccaatgttgtgtgcatgaaaaggattccttggttatgtgcagggaatcatctcacatgctgtttttcctatttggtttgagaaacaggctgacactattctctttgattagaaaataaactcataaaactcataatgttgatataatcaagatgtaaccactataaatatgtagaagaggaagttttaaaagaccttaagctggcattgtgaaggaacaccatggtagactctttttgtaaatgtattttgtatttaatgaaatgcagtataaaggttggtgaagtgtaatataattgtgtaaacaaatcctgttaatagagagatgtacagaatcgttttgtactgtatcttgaaacttgtgaaataaagattccacctctggttatcctgtatgctgtaatataccacaaccaagcacctttccagacagactttttttaagctgaatgattcaattttttaatgttttttggaaattcagaagcttctgaaaacattcacttgtggcaatttgaatttatctttcattttaaactcctgaaattcagatttttacaagtccaatattgccctagggagaacatgaatttgctaagaaatgttatcttttaaatctctgatatctttgtcttgaagcagccttgatatgtagtaagcgtgattcactttagcctgattataatattatttatctaaagtttgtttatgcattgccttgtcccaggaattttttaagaggacttgcagagacacgtaccacacagtaacatttagactaaatatgctctgagtaaaggagaaatgaaaaaatattaaatcaagagtgaacatgtacacaaagtgcaattggaagtgggctacaaatttggcccccagcttcccagcaggcaactcaaagaggtaactgaggtaaaatgttccagctcagaagcattggatcttggataaaaagcctacatgatgcaaactgtggcaactgagatgtcagatctcaagatctcaaattgtacttgtgggagcacagtcagtgaccccagatgaccttgactgacctaaaagttgtgggggaagtcggatgtcagagccttaacaccagcaggtgaccatccaacctggggcaatgcctgcctgttcaccacttagcctctttctggcaagtcattagaatgtcctccatcttcattggctgcaacttgatgagctacagcctctttcctaacttcctttatgatgctagtttaggttggttataccagcttggaagtatgcttagattaagttacagcagatacacaaattagatgcaagtaaaaaaaatcagaatttctgtagtagaaactacgaaaaataaaaaggaaagtttttactttttgggtatttttttacgaataagaaaaagtgagcgttaatcagttcaaaaggaggtactgctgtgtaatgggctttgtacgttccttctcatgtcacttacgtcactacttcgccatcaaattgaacaagcttttaattagatcctgaaaattcactatgctagtagtttattggtagtattatattttgagtagaactctgattttccctagaggccaaattctttttatctgggttaatttcttttaaacataacaatgttaatgctgaattgtatattaaatcccatttctaaaaaccacacaattttttctcatgtaagttgagtggaatgtggttagttaactgaatttggaatgttcatataaataatttgttgctgctcaatccggtttcccactgcctcctctctaccgcccagtataacctcgttaattcacctctcggacttggaaagaatgtctcataagtcttgggagataagagattcaggtatcccaagtaaggattctaacttcgaaaatgaatatgtcattgagttttacacgattcaagattcaaacgtgggcaacagaaatctctgttcttggaaacagatttatttcaggatgtgaaagcccagctgtgggtttcagagtttgcacacctgcatttcctcacccttcatctgtggccatgctcgtagatgcttttcttaggaaaatttgattaattgaactttttttgttctaaatgcaatctgaaatgagtagagactaacgctggctgtgcgtgcgtgtgtgagtgcatggtagtgaggggttggggagccttccagctgattttgtttcccttaagtactaatgaagaatttacttgaattgttctaacctgtacatgtattttctttgacctatcatttggacaatgttctgtggttaacatcttaaattttttttttttttttttgagacagggtctcactctgttgtccaggctgagtgcagtggcttagttagagcccactgcagcctcaaaactcctgggctcaagaaattctcccaccccagcctcctgcatagctgggagtactagtgtgtgccaccacggacagctatttttttattttttgtagaaacagggtctccctatgtttcccaggctggtctcaaactcctggtctcaagcgatcctcccacctcaacctcccaaagtgctgggattacaggtgtgagccactgtacccagcccatcttacttctttcagtgcatggaaatttacttccaggaccgcgagagctgagaagagcacggtattttccctttagccttctttggaccgtagctgaagtatgtgctgtaggtgaaagcacccacactgggcctgtaaagaactgcctttatttcaaaaggaggaaaaagtaattgaagccttaagtttgtgtaattggtatctgtatttcatcactcatttgagacttaaaagtaattaaagcctcataactagactgatgttttgtgttctcacattagctaaaccaaagaatctattgagtctcaacacagtacattaagttaagagagcacatttgtgccttcgagcagttaaatagaggagaaacccatgaacagagatgaaaccccaatttacagagaaatgaaactccatgtcatctgacctattgccactacttaaaggggctttgtaattgtgagtcaccatttcagggcaggccattatgacaaatcagacagatgcataagggaaaggtccatggctgggtgcagtggctcacgcctgtaatcccagcagtttgggaggccgaggcgggcggatcacgaggtcaggagttcgagactagcctcgccaacatggtgaaaccccttctctactaaaaatacaaaaattagctgggcatggtggtgcgcgcctgtaatctgagctacttcggaggctgaggcaggagaatggcttgaacccaggaggtggaggttgcagtgagctgagatcgtgccactgcactccagcctgggtaacacagcaagactccgtctcaaaaaaaaaaaaaaaagatccagacacaaccaaccgtttgatcctcgcatgagttcttctgagttgcccaatcccctcccaaacagattagtgatagtcagtcctagccccactgaatggccctatgcgaaggaaaacgggaaggacgccatagcgagaaagttctggactgcagtcgagtcttcacagtggttgggtgaccccagacaagtcattcgctgtacagggttctcataggcatcaagagactgggtactggggatggtccttaaggtcctgtccagctgtgggaggtcttaagtgccaaaagaaaccaaattgactttttattccactgacaccagacccttta

SEQ ID NO: 107 - DNA, 2363 bp, Homo sapiens
ctacaatctgtggcctcagcccttgccaactctgcctcttcccccgctgactggggtatcagtttatggtgccctgcaggaagaccctcttgttcctgtgggtgggaaggttctggaatctcagttgccctctctggagttggggagacataggcttttggaggacaagctttgcagagtggttcatggagtgaggtggtgggagatttctgaggtgcggtgcggtgaatggagcaaatcagaaccaccccttggacgttgatctcaagcttggctccagaactggcttttgaaggtggagcctctgcagagatgtgggcagctggtcaggatggccattcgggctcagcacagcaacgcagcccagactcagactggggaagcaaacaggggctggacaggccaggagagcctgtcggacagtgatcctgagatgtgggagttgctgcagagggagaaggacaggcagtgtcgtggcctggagctcattgcctcagagatactatgggggagcagaggtggtggatgaaattgagctgctgtgccagcgccgggccttggaagcctttgacctggatcctgcacagtggggagtcaatgtccagccctactccgggtccccagccaacctggccgtctacacagcccttctgcaacctcacgaccggatcatggggctggacctgcccgatgggggccatctcacccacggctacatgtctgacgtcaagcggatatcagccacgtccatcttcttcgagtctatgccctataagctcaacggctttagctgtttgtgtgtctgtccagcccaaaactggcctcattgactacaaccagctggcactgactgctcgacttttccggccacggctcatcatagctggcaccagcgcctatgctcgcctcattgactacgcccgcatgagagaggtgtgtgatgaagtcaaagcacacctgctggcagacatggcccacatcagtggcctggtggctgccaaggtgattccctcgcctttcaagcacgcggacatcgtcaccaccactactcacaagactcttcgaggggccaggtcagggctcatcttctaccggaaaggggtgaaggctgtggaccccaagactggccgggagatcccttacacatttgaggaccgaatcaactttgccgtgttcccatccctgcaggggggcccccacaatcatgccattgctgcagtagctgtggccctaaagcaggcctgcacccccatgttccgggagtactccctgcaggttctgaagaatgctcgggccatggcagatgccctgctagagcgaggctactcactggtatcaggtggtactgacaaccacctggtgctggtggacctgcggcccaagggcctggatggagctcgggctgagcgggtgctagagcttgtatccatcactgccaacaagaacacctgtcctggagaccgaagtgccatcacaccgggcggcctgcggcttggggccccagccttaacttctcgacagttccgtgaggatgacttccggagagttgtggactttatagatgaaggggtcaacattggcttagaggtgaagagcaagactgccaagctccaggatttcaaatccttcctgcttaaggactcagaaacaagtcagcgtctggccaacctcaggcaacgggtggagcagtttgccagggccttccccatgcctggttttgatgagcattgaaggcacctgggaaatgaggcccacagactcaaagttactctccttccccctacctgggccagtgaaatagaaagcctttctattttttggtgcgggagggaagacctctcacttagggcaagagccaggtatagtctcccttcccagaatttgtaactgagaagatcttttctttttcctttttttggtaacaagacttagaaggagggcccaggcactttctgtttgaacccctgtcatgatcacagtgtcagagacgcgtcctctttcttggggaagttgaggagtgcccttcagagccagtagcaggcaggggtgggtaggcaccctccttcctgtttttatctaataaaatgctaacctgccctgagtttccattactgtgggtggggttcccctgggccaaacagtgatttgtctccctcaatgtgtacaccgctccgctcccaccaccgctaccacaaggacccccggggctgcagcctcctctttctgtctctgatcagagccgacaccagacgtgattagcaggcgcagcaaattcaatttgttaaatgaaattgtattttgcccaaaaaaaaaaaaaaaaaaaaaaaaaaaaaaaaaaaaaaaaaaaaaaaaaaaaaaaaaaa

SEQ ID NO: 108 - DNA, 1100 bp, Homo sapiens
ggagacgcgggggcgccggcggccgttgggccgcgcaagtactgtcaaggacagttttcgggacgggggacgcggctccaggcacccaacagcactgacggcgaacacttcacgggcgcgcgatgcctcgacaaggcggccgccaccaccacctcagctgccctcgcgggcagcacggcgcggcaaaagcgcacgtcgcctagcgatggcgcggggcggggacacgggctgtaccggcccgtcggagacttccgcttccggggccgccgccatcgctctcccgggcttagaaggcccggctactgacgcgcagtgccagaccttacccctcacggtccttaagtctcggtcgccctcgcctcgcagcctgccacccgcgctcagctgcccgcctcctcagccagccatgctggagcatctgagctcgctgcccacgcagatggattacaagggccagaagctagctgaacagatgtttcagggaattattcttttttctgcaatagttggatttatctacgggtacgtggctgaacagttcgggtggactgtctatatagttatggccggatttgctttttcatgtttgctgacacttcctccatggcccatctatcgccggcatcctctcaagtggttacctgttcaagaatcaagcacagacgacaagaaaccaggggaaagaaaaattaagaggcatgctaaaaataattgaggttttcatgattcagcacctgcttttgtttctgtgagatgagctaaattgctttcataccccagataagagctaaaaccacctaatgctcttatggcacagctgtgtatagatttagttctctttatacttcatttctagcccagttgggttttgatttatataagtagtttagaccttctcttcataatcttgctctgagatggggaacagaacacacaagtatgaagtttctttcaggtgtaaataatgaaaaataaatgcctcataaatgatagtacaatgtaactatcaaagttttataattcattatgagttaaccattttaatgtttccaattaaacctcatagtgcaagttctttgtctaaaaaaaaaaaaaaaaaa

SEQ ID NO: 109 - DNA, 2731 bp, Homo sapiens
agacaagtcggaggggagggagacgcagaggcggacaagatggcggcggcagctgtacagggcgggagaagcggtggtagcggaggctgtagtggggctggtggtgcttccaactgcgggacaggaagtggccgtagcggcttgttggataagtggaagatagatgataagcctgtaaaaattgacaagtgggatggatcagctgtgaaaaactctttggatgattctgccaaaaaggtacttctggaaaaatacaaatatgtggagaattttggtctaattgatggtcgcctcaccatctgtacaatctcctgtttctttgccatagtggctttgatttgggattatatgcacccctttccagagtccaaacccgttttggctttgtgtgtcatatcctattttgtgatgatggggattctgaccatttatacctcatataaggagaagagcatctttctcgtggcccacaggaaagatcctacaggaatggatcctgatgatatttggcagctgtcctccagtcttaaaaggtttgatgacaaatacaccttgaagctgaccttcatcagtgggagaacaaagcagcagcgggaagccgagttcacaaagtccattgctaagttttttgaccacagtgggacactggtcatggatgcatatgagcctgaaatatccaggctccatgacagtcttgccatagaaagaaaaataaagtagccaattctaaaagtagccctctttctcctggatcttgctgaattagtggcttggggggtgggggagataaaaagaacttaaaatgggtaaagtaagaaatgttaaaaagtccctgttttgtcctgaaattttagtctattctgggtaaataggattttctgacacagatatgagaagttgtagctctgatgtctagctgtagtctccttgatctgctgattgcattattttaatttgcttttctgggaaagcagttttgctaaaagctgtacagactttttcttttgtacctagcagtactttatatagtatagctttgggccatgtagcattttaagactcaattttaaaaaattattaatctgttgctgactcttaattcctatttcaatatgtgtttccttgaagaattcaggatacaacttcttgtgtatgacagctttccttcacacactatttttgtgggtgtgtatatatctgatttgggaagaatttaaaaaacacatagctttttaatttgtttgaaacagactttctgcctgttacatttttgcttttaaccaattaaagaagccaatggcattttagttttatattgtgttttccactagtatatccctgttgatttgtttgtgccttttattaactgccattttctaaaatttttttcaataaaaggaaggaagatgtgaaaaaaatggagtcatagttttgatggagagaacagagaaacaagtgttaacatctttctactataggtttttttcatttttaggctattttacttgtcaaaggcccctgagaacctgtagctaaggaactcttagctttccagtgataataacaataataacaacattctgtacttactttgtgccagaaatgctccaagtactttacatgtgttaataatgctcacagcaatcctaagaggcaggtgctgttattatccccattttacacatgaggaaactgagatacaaaagttaaataattgtcacacagctagtgatagaactgggattcaaacctggggagtccggcttcagagtttgtggtcctgcagagacaaaacagccgcttttccagtattttcccagtatggtcagagaagacctgggtgcttgccaagatcctttgacctttaggaatatttccctacagccttacaaaacatcaattttggctgagcctagtacccaacactatattcagtttgtaagaaattaccattatcacatttcctgtttgtcttggagaggttgtcctatctcgcaccacatggtagggaattgtgaacaacactggacagaaagttaaagccttggattctgtactcttcattcctgtaaaccttgggtaagtttcggaattctctgtgagcttcttaaagtttttgaaagcatgtaaccggataagtgtatttttacaatggaggagttacagtcatcttggtatttgtgggagattggttccaggatccccaagcataccaaaatccaaggatgctcaagtcccttatataaaatggtatagcatttgcatataacctacacacatcctcccatatacttttaatcacctctggattacctataatacctaatataatgtaaatgctatgtaaatagttatactgcattggttttttaatttatattttttgttattttttaaaatatatttttaatccatggttggttaaatctgtagatatagagggccaactgtactgttagacacaagggtctcgaggcttgcagatagagactgaataaccctctccatgatgatcccttagagttcccccactgtgcctttttctttacatgtgcatgcaaacatgtgtctccacatacattttttttaacaaaaattgaattatgttgatatatgtcctgtaatttgtgttttaaacttaatatatcttaggcattttccctgtgtgtgtgtataatgcagctattaaaaatgagtctgaggccaggaaaaaaaaaaaaaaaaaaaaaaa

SEQ ID NO: 110 - DNA, 1466 bp, Homo sapiens
cgcctcctgcctggtctcgggtgccagcgccgccggcggagaacaggagcatggagggcgggctggggcgtgctgtgtgcttgctgaccggggcctcccgcggcttcggccggacgctggccccgctcctggcctcgctgctgtcgcccggctccgtgcttgtccttagcgcccgcaacgacgaggcactgcgccagctggaggccgagctgggcgccgagcggtctggcctgcgcgtggtgcgggtgcccgccgacctgggcgccgaggccggcttgcagcagctgctcggcgccctgcgcgagctcccccggcccaaggggctgcagcgactgctgcttatcaacaacgcgggctctcttggggatgtgtccaaaggcttcgtggacctgagtgactccactcaagtgaacaactactgggcactgaacttgacctccatgctctgcctgacttccagcgtcctgaaggccttcccggacagtcctggcctcaacagaaccgtggttaacatctcgtccctctgtgccctgcaacctttcaaaggctgggcgctgtactgtgcaggaaaggctgctcgtgatatgctgttccaggtcctggcgctggaggaacctaatgtgagggtgctgaactatgccccaggtcctctggacacagacatgcagcagttggcccgggagacctccgtggacccagacatgcgaaaagggctgcaggagctgaaggcaaaggggaagctggtggattgcaaggtgtcagcccagaaactgctgagcttactggaaaaggacgagttcaagtctggagcccacgtggacttctatgacaaataagcccatgtttttggcttcctgaacctttttgcccccacttttagacataccccagagccctgtggctccccacaccctgccataggggcagtcctgccttacacatagaagcattcatgcctgctgccctgccctcaggcacagccagctgtgagctcccaggtcattggccttaccagttgtcaggagtctgtgctgtgcaccctgggttataaggaggcttaggagagaggttatgggtattggtgtctctatccccaggaatagaacttaaggggtgggaagaacaggaaaagaagctggaacacagaagagaggaggttgtgtctcttgctcatagcaagcctgtgggtagaggaaagagtgatctggtgtcgaataggaggacccatgtagattcgcagatggcctggatgggaggaagggcagacggtacatgtcccagcccacatagatgccccttgctgagggtagcaggaccttctgttgaactttgtgtcctcactctgatgtctccttccttcagaatctaccacccctcccccaggctgggagaaggggctcctgggtgtctgtatacacgccaaaggcagatacaaataaaatacagattgtcctttcttaaaaaaa

SEQ ID NO: 111 - DNA, 108473 bp, Homo sapiens
ggtgcagtggcttacgcctgtaatcccagcactttgggaggccaaggttggggattgcctgagctctggagtttgagaccagcctgggcaacacggtgaaaccctgtctctactaaaatacaaaaaaaaaaaaaaattagccaggtggggcagcgtgcacctgttgtcccagctactcaggaggctgaggcaggagaattgcttgaacccaggaggcagaggttgcagtgagccaggataacaccactgcactccagcctgcaccactgcactccagcctgggcaacagagcgagactccgtctcaaacaaaaacaaaagcaaaaacaaaaacaaaaaacaacaacaaaaaaactatcttgaaagtagccaaagaggagtgccacattacctttagtgggaaaacaatgtgaatgataacagatttctcactgaaaccatgtaggtcagagagaaatggcacacttttcaagtactgaaagaaaataacagttggcccagaattctatattcaatgaaaatatccttcaagaatgaaggggaaagggattgcagttttaaaatttgggaaacagtgaccaaaatctgagagcttctctttggaacatcaagggcaagcagcaagaccaggagatgtagtttgggggagcaagaaggacatataggattagagactcttctttggaagactgatctaaaggtttaggaagtacttggagaagaaggaaatgttggggtgtcctgatgagttggtttgtgaaccccaagtatacaaagacatccttatgaggcagaatgtctcaaggacttagaggttatctcccaggagccagtcatgggcaaatcttttctttgaaatatacggagtttatacatcgcaagcctgcttagttaaccccgtattgcacatacagcaaccaaatgcaatgtgtggaccttgtttgaattttgattcaaacaaaccactgtaaacaaaacaaaacaaaaaaatgaccttttccttttttcatttaacagtttattaaggtatagtaaacatataacacattgcatatatttaaattgtacagtttgataagttttgatatatgcatatacttgtgacatgatcaccacaatcaaaataatgaatgtatacagacatcactcccaagagtttcttcttgttccactttaatccctccacctggctcttctatgtcctccctatccccaagcaaccacttatcttctttctgttaccaaatttgtatttttcagaattttatgtaaatggaattatgtagtgtgtactctatgtcggccttctttcattcggcataattattttgagtttgtctatgttgttgctgtatctataatgtatttctttttattgctgaatagtatttcattgtattgatatacctcaatttgtttatacttcaatatgtccatcttgtgttggtgggcatttggtttgtttccagtttggggatattacaaattaaggtgctacaaatatttacatacaagtcattgtatggacatacgcttttgtttctcttgggtaaatgcctgggatggaattgctgtttcatatagtaggtatatgcttaagtttttaactaaaatggatgataggccaaaaggtaaaatctaacactatctagatgaagacatagaagaaaacctttttggccttgggataggcaaatatttcttagatatgactgcaaaacataattcatgtaagaaaaaaatgacaaattaaatgtcctctaaagtaagaaacatgctctttgaaatacagttaagagaatgaaaaagcaagccacagactgggtgaatatttttgcctgtcacatatctgataaaagacatgtccggcctggtgcagtggcctacacctgtaattccagcactttgggaggctgaggcgagcagatcacgaggtcaggagttcaagaccagcctggccaacatggtgaaaccccgtcactactaaaactacaaaaattagctgggcgtggtggcatatgcctgtaatcccagctactcgggaggctgaggcaggagaactgcttgaacccgggaggcagaggttgcagtgagctgcgatcgcaccactgcactccagcctcggtgacagagtgagattccatctcaaaaaaaaaaaaaaaaatacatgtccagaatatataaatatttctcaaaagttaataagaaaacaaaaacaaaatttttaaaatgcaccaaagatgtgaataaaaacagaagacagacgatatatgaatggaaaataatcacatgaaaagatgcccaacatcattaatcattaggataatgcaagttaagacacactgagatactgctaagcaccaattactatgtttaagattaaaaacattacaataccaattactggcaaagaggtagaacaactggaactcccataaactgatgggaatataaagtggtacaaccactttggaaaacactttgacagtttcttattttttttgctttgaactttgactttaaaataatttccaacttacataaaattttcaagtcactcaaagagctctcatatatccttcacctaaattctccaatgttcaacattctacatttgatttagcatcatctctcttctttttcctgaatcatttgggagctaactgcatatttaatacgtcactgcccccttaatgctgcatttggtataatactgccatgtaatccacagattcctttcaaattttgctgtttgttttaattatatcttttataggtccagcgtccagtatagattctaattttacacaatggaaatatttgaacatagattaggtattaaacgatgctaagaaattgttaatttttttttaagagacaaggtcttactctgttgcccagattggagtgcagtggtgcaatcacagctcactgcagccttggactcctgggctcaagcaatcctcccactcagcctcctgagggtgggactacatgtcacctcgtccagctaattttttattttattttttgtagagatggggcctcgctatgttgcccaggctggtctcaaactcctggcctcaagtgatcctccaccttgtgctgggattacaggtgtgagccactgtccctggccaaagggttacatttttagggtataagattagtaatatgttatgttggttccttttctagttagagatatatccttaggtatttattttttaaaatgatatgattgagacttaaaaaaaacactcctgagggatggagagaagagatgaaataaaattgacaaaatatctatggttgttgaagctggatgatgagtacagaggagtttacttctaagtatgtttgacattttcataaatataggtttaaaagaatttttttaaagaccaatagagaaatggagtaattttaaggattagagtgcaatggccatatttgcaatttagaaacattactctggctgcaataggaagaatggcttaatgtggggcaagaatgaagacagtgactaattaagagagttattgaagtaacccagggaattggtgacagtagcctgaactaagttagtggcaatgggttagagtgtagtggatggacagaagtggtgactatttggatgtgagttgagagaaagggaattcagaatcacactcagttgaatggtgccatttacctagtcagagatcactggagaaggaacgggtctccagcagagggaagatgatgatttaaattggccttgggtcaagctagtgcatttgtgttatctggccagaaatgagtggatagatggcagcaaggaatttacacaatcattatttagtgaacagtggaggagtaagcaaggtagacagaagaaacgtcacttaaacctaacttgggttagtacaataggattattcgaaatggacatgcagcattagtaagttactgaagatgaagtgcaataacaatgtctgggtagacaggttattattttataaacttgaaaaacgacgacttgaggcaggatataacacaaagactccctaaattcacactgagtgaactgggaagggaacatgattctcttcatgggaaggtagctcataaagatgcctgagtggaaagacagttttcaattgaatttgcaaggtggtagtggagatccccaaagctggggaatgtagagacagagaacataatgagggtgttgaatctgtggctcagagaataagtttgggggtactaaagtgggaggaaggagggtggggggggtcacaatttttactcccggtagtcttgttctgggaaggtacaaggtgaaattagaagtgacctcagaacccatcgacgtctgccctttaagagtttcccggccgggcgcggtggctcatgcctgtaatcccagcactttggaaggccgaggcgggcggatcacaaggtcaggagatcgagaacatcttggccaacatggtgaaacaccatctctactaaaaatagaaaaattagccgggcgtggtggtgcgcgcctgtagtcccagctactctggaggctgacgcaggagaatcgcgtgaacccggcaggcggaagttgcagtgagccgagatcgcgccactgcactccagcctggggaacaagagccgaaactctgccaaaaaaaagaaaaaagagtttcccgcactagccatgccagggtggagaagttccagcaagcacttctgttaaagatacttgtttcgtgaaaactatacaatgtggcgttttcattcctatctgtgattcatttcttaagttcgtggagttcctttgctccccttcccccagcaggatgtgggcaaagctgtccccctgccttcttccttcgcctgggcttctggagcctccggagctagctcccggcgcggagctccgcctacggcccgtccccggcgcggaaccccgcccacgagcccgtttccagcgtggaacaccgcccatagcccgtccccagcgcggagccccgccccgcaggctgccgggggcccaccgccgcccaggcaaggccgccctgccttgggcgcagcgctgccatggctgggggccgtggggcccccgggcgcggccgggacgagcctccggagagctacccgcaacgacaggaccacgagctacaggccctggaggccatttacggcgcggacttccaagacctgcggccggacgcttgcggaccggtaggaacgtggcttgtcaggcccgggctggcgtgccctggcctccccgggccctgggccaaagcccggacacttccagattgggccgccgctttaggatcctgcagtcttttcatcccttaggttccacccatgctcactttagtccttgcacctgcagctggtctgcagaatcccacctaggccgaattcttctacagtcctttccccatgatttccccagaggaatccccctggattcctccctcttacctggcactgcttcttattcctgcctacatcccataacataactgcctccttccaaccttgtcctttttcccctctgaaagcccttgcggatgataccacagcaattcatacgcgccccttgctactttgttctgagaacgctttttgggctctcgcacaggccttacgtcctcaatcagaattctcaagtctcatccatgcattcaaatctgcacgccacataattccctctgtactccccaggcatcctcactgtgttttccggtatggaggaactttccatacctctgcaccttcctctaagacatttagctcagaataaagcacacattcatcttagctgtagtagagagagggttctagactgagtctagagaaggagtgtccaatcttttggcttccctgggccacacacaaaatacactaacactaaggatagctgatgacctaaaagaaaaaaaaaattcgcaaaaaaacctcaatgttttaagaaagtttacgaatgcgtgttgggccacattcaaagcggcccatgggcctcgggttagaccagcttgctctagctctagaccttttaaaatggcattttgtttaaaataatattttgcctttttgtctggaaattaaggcacgttataaagtatttatactgacagttttttccccatccttgaagagttgatctaccaaactatttctgaatattatcatattatcatttaaaacatagttctaacttcatctgctttttttttttttctttttgagacagggtcttgctctgtctcccaagctggagtgcagaggcatgaccacggctcactgcagcttattctcaagcaatccttctgcctcagcctgtcaagtacctgggactacaggcacatgccactacacctggttaatttttttaattttttgtagagacagagtcttgctctgttgcccgggctggtatcaagttcctgagctcatgcaatcctctcaccttggcctctgaaagtgctgggattacaggtgtgggccaccgcgcctggcctcttcatctgcttttaactttggcatttcacaacatctgctctatctacacatccaggatttcctcaagaaataccatcttctggagctatcaggacaaaatattctctctcaaactcagggtgcttcttccttcattaaatatttgttttaggcattaggaatacagctgtgggcaaaacagacaaaaatccttgccctcagggagcttacttttctaatgcttaataatatgaagttatttttaacctgaaatggtaaaaatataaattattccccttaacatgacagagaagttggtgactggggaacttctatcttcccaaaccttgagaatcaggaagtaggcccaagaagcagccaaaataggtgtctcaaagtgtacatgggactcaacacaaagctcctaaggcttcattctgaactagtttgtttactttatacaagcttagttgtctgctcctagggctgcagaaaaatggaagagaaaaagcaacttcttttaggtagggatattgataacctcaagaatttatagctggtggctttcataacaagatggaatactagacaaaccaaagcaaaaactatagaaggcaggcagaagaatttaaatagctgtctgtggcctattgtacaccgggcaaatggcctcaacacattcataggactggcaggcaaataattgatggtctcaaggatgaatcagagtttagtcattcaacaagcacttattatcacctgctatttgccagggaaaagtgatgcaggtccaaaatcctttatccaaaactctttattgagagggagtttctctctgtcgcccgggctggagtgcggtggagcaatctcggctcactgcaacctccacctcccaggttcaagcgattcttgtgcctcagcctcctgagcagctgggattacaggtacccgcctccacacctggctaatttttgtatttttagtagagatggagtttcattatgttggccaggctggtctcgaattcctgacctcaagtcctcccgcctcgcctcccaaagtcctgggattacaggtgtgagccaccgtgcccagccttttatccaaaactcttgagacttgatgggtttcagaattcagaagtgcttctgttcacgtttatgtgtgcacattccacacattacctaataccttcctcagtgtctggggcagcatcgaaaatcaaacacaatgaaacatagaaatactcaaatttcacactgaacaaataaacactataactaacctcatgtcagttcaggctaaatttgctgccaataaattcaggttagatttttttttcaacttcttttagtggggatgtgttgtaatataaatttcagtttagtagcatatgtatatcatttataaataacattttgaggtgcatgctaaaaacttttgcatttgtaaaaagtttagacactgctagtttaaagtatctataatttatagatagttacaaattactaacttattttggctagctttccacagcagcaaaaggtctgctcatttataatttgatagcttttggaaacatccctccaaaaaacttgcttcaatccctggatcccccagtagtgtatggtggtgtttgttttcctttatcttcaacaatactatatatgttagactttttcatctttgccacataaatgaaacatatctcattttaatttttatttatttataaattatctagaacacctttgtttacaaaccattgatttttctttttctgtgaactgctcatactctggtttatttttctactctgtggtccattttcttgtttatttgtaagagctaaatatcttaagaaaactagcattttgggtcatataatgcatatatttttctcctaattatatgcatttatttacgtaatttatgtgatttaaaaaatgttgatagagtcaaaatgaccttttttttcttttatggtccctgtgggttttttttccccctctgttccaatgttactaaaaaccaaattcgtcaaagtttacttttaacttgttcatgacttcgtttttaaattttcatcaaataaagatataagtaggtttttttttttaagttcttcgttccatcaaagtacgggcctaggccacctccccgtgtgcatccctcctcctccagctaggcagctagacaaatataggcaattgaatttttcagtgtcttccactcatttgaaatgccattcctacaagcccagtgcctggtaaaacaaacaaaaaactttcaaaaattgttactgaatgaaataattctcaaatgtatttcaagtctctttttttccttgcctggaatgcttggtctcttggcttgtctcagcttcaatgctacatcctcagatagttcttctttgataaccacatttaagtatataccctcacaccccaagtcgtttgttaaggagagcaccacgtcatctcttcaacggcactctctaagcttgtacttatgtgtttattatgtttgttttcccccaccagactgaagttccatgagagctggaaccatatctgtgttctcacctccgtggactaagcacagtgcctgacacagagtcagtgcttagcaaatatgggtgatggatgtgtgatgggtgaatgagtggatgaaagacctgtggaccaaagagtgcttaacccttccccagaccacattcgcagaattatgctttatggaaggacccacacatttatcaaggattattataaagccatataagaactgatcttacaaattttgtacacatagtagaagagtacagtgtttattatatggtactccttgtaaggttcacgttataaatttctgttagaatttagtattataagtactttgcttccctaaaataatttttaggctttctcttttctgatgataccacgtttctctttttgccctgcctgccaggacattcagagaaaaaaatcaaggctcaatcccagcaacttaggatggcataataaaagagtggcttatgggaggagacagggtttggagttaaggctgggtttgaatcccagctctgtccctgtgtatctgtaggcaagaatgtaaaactccctgagcctgagcttctgtatctgtaaaatggagatgacacctgccttgcaaagttggtaaggtgcctggaccatgggagcgctcagccattgttttttctctcagactccccttgttcattatatacatataatatgaactacttcaaatccactttggaaaaagtgtatctaaattgaagaacaagggtattttgcgatttggtgaaaagtagttgattgaaaacatatgcaattctctccttgtcaagggttttcatttgttaatatctcagtattcagatctcaattcaaatctcccctgctcgcagagtccttcactgacctacctgtccagataccttctcctcgcccaccactatgtccctctactctgctttgttttctttacagcactcatcactatttgaaatcactcgtcttctagtttgtatcagctggttgggactgtgtctgtctaaatttacccctgcactcccagcttccaggagagcacccaggcataataactcagtaacatctgaacgaatggaagctgagtggaacattttggttcattccttagataacttaaaaaaggaaagtgcattttcactggcttaggttttgtttttaaatcatgcttttggaaagtatgccagattatctatttaaaatataattacaaatatttttaaagtagaacttttgatctaaaatgatcattatcttaatcattaatgattggctctacagctttgaaaaaaattttttttgtttttcctcttttaggtcaaagagccccctgaaatcaatttagttttgtaccctcaaggcctaactggtgaagaagtatatgtaaaagtggatttgagggttaaatgcccacctacctatccagatgtgtgagtacatttataaatagctttgacgtggtttcagttttctgttttgacaacatagaaacagattgaaattcgtagtattttctccttcctgctcccattccacataaaatttcatttcctctatttcaacaaaactacatcagcaatagatgttttcatgaaacctgtctcattttaagcctgttcatagttatagaattgtcactacagatacttatatttgcctagtgactattttgcttcctctgatgtgttaacttttgtttatttatttcttcataagttaggaagaggaaaatttggaagaaaacaataaaggcatggtgactgttgaaagcccttgcatagttagagtgtggctggtattagaaattcagcaagtctgtgcctcagatgacctttcactgcctagagtgagggagagtatttggatctgtcctgcctctcaatggggcactctggcgagtgtccattgtgcagggctgtgctgtgcactgcagtacgtttagcatccctggcccccacctaccaatgccacgagtgtcctccaggcattgaaacaaccaaataacctacatatttccagactccctctgaaggtgatgtcacctctggttgagaaaaactagttagagccaaagtgttagccatcagcacttaagcatgtctatttggtgtaatctttccccacccatcccacatggaaaggcaggttggcctggatggcgttaagtagtttgaaattattgtatggggaaccagtgaaggtttttgagatggaaagggacaagtaaaaggaaactctgctttacacagtgggtggtaaatttatggaatttattatcctaagaagtgatagggaggatatgaaaagacagataagtcaaaattgagctccttgaagtcagtaaccattcttggcccccaaaactgtcctgagagtattatagtaggtatactatacatactataaaaatattaattaacgaaacgttaattataaaacattaatgaaaaagataattaaaaatttatgaaaggaaattaaaagagtgcctctctaggttgtttttttttcctgacaccaaatacatgatgccttttctgataccatgtgggtgtccagtagttcagttcaattctgacactatctgtagttagcaaagaccccacagattaaggacccagttccacaagattgcctccatttctgatgctagtggcaagtcccagtacttctgaccatttatagccagtatttataactggctataaatttaggggtttccaccaccccctcctaagttgcgataattgctagaatgcatcacagaactcagtttctgtgagttacatttaccagtttgttgtaaaggatatggctctggaatagccacatggaagtattatgaagggtaaggtgtgtgggaagaggcacagagctcccataccctctccaggcctggcaccctcccagcacctccctgtgttcttcaaccaagaatctccctgaaccctgtcgtttaggggtttttatggaggtttcattatgtagagatgattgattaattaaatctttggccactggtgattgaacttgatcttcagccccctactcctccctaaagatctgggatggggctgaaatttctcaccctgtaatcaaggcttggtttttctggtgaccagtcctgatcctgaagctatccaggtactgaccagagttccctcatgagtactaactccggtatggttggaaggggtttgttatgaaaaacataagatgctcctctcacccctgttgctcaggaaattccaagggtgataggatctctgtgccaggaacaggggtcaaatatcaaatatatatttttttattataccatagcctcaagaattcaaagtgtttattcttgaaaaatcaaaataaagaaaaaggtataagtgctataatgttatataagtgctaaaatattaattatagcattatttgtgaaagcaaagatattggaagcaatctaaatgtcaaatactagagtgaggtttctccaccttggcactactgacatgtgggcagataactctttgttgtggggtccttcctgggcattgtgggatatttagtagcatccctgacctctgtctgctagatgtcgggagtacatttctccccaggttgtggcaaccaaaaaaagtctccagatgttggcagatatcccctggggccaaaatcacccctggttaagaatcatggcactagataactattcaggtaaatcttaatgtgtccacttgataaaaatattatgggatgattgcttttaacatggaaatgcttataaaagttaaaaagcaaacattataatatcagctacataaactatgaattatatagcaaggaaataaagagaacattagaattttttttgaagtttaattagcatcattgatgattttttctccattctgttaatattgctatattatgattacttattttttaaattataacaaaaatcttaatttggggtaatattcttatccttttgaatgtggtacaggaaaacattgcttttctgcagaatagtcctgggtgccactgtgagagagagactcccgggttagattctggaattctggaaatttcagccccatcccagacctttggggaggaattctagaaatttcagccccatcccagctctttggggaggaatctaacccaggattccatacatagagtcaggactgtatggtttgtttttctgttctttccctcatatagactactttctctcagatttctatctatagaaatagataatgatcatagcaccctttcatactgaagcattgagagaacgcatagataagtgcatactcaagacttcactggttaaatgccatgaattactcagaaatgcttggtaaaaagtgatgagtcatcatctcttcagtaaaattaaataactcctatttaatctgagagagttgttattggatatttattggttgggaataaaatgaaacccgagggctggttgtgtaatgtccttgagttgaaagtgttgacttagatgagctctaggcagaggtgcagagagtgtgcatgactagatgtatttatacacaagaagtgagcatttccacctggtttcgatcagaatgagtgattgggatgcagcagtgtgttgtgggaatactagagggatcaccagggctccactcatctatttattcttgttctgctttatgctagagcacacctgaatgcagagcgcttggccttgccagtgagctgtcagagctaggttaattctcattggctgcaagctagggtagagaattaccatacaaaggagcacatggttaagttactgggctagagtcagctgcagaactggaatgatttttttttttttttaaggtgaagaactcagagttagggatccaggtcaaatcgtaggaaataaatagtaattgatgttgggaaattttaatcagattgtaaagctgaaattagatacaggggtcaagcccagtaagtctaacagcccagacagaaggctttggccagcccacttcttccctgtaggacgcaggtgactccactgtcaactggagttgcagggatatggttgaagtccctttgagattaagggccttgggcccagagtgctttcagtttagcaaatattaatgcaaacaggctatactttctggagtaactcttttttttttttttttttttgccttttccagagttcctgaaatagagttaaaaaatgccaaaggtctatcaaatgaaagtgtcaatttgttaaaatctcgcctagaagaactggccaagaaacactgtggggaggtaagatttgttaaactggaattaaaagaagacagtaaacttccccattacacctcaaatccaattttgagtagcatgttttgtgttttattggttctacaaaagggaacattgtgatttttatttatttaataggattaatgaaatttgtagtctatagatggtactattgatgctgaagaatgtttctgaaaattgctaggcatggtggctcacacttgtaattccagcacttggggaggctgaggtgggaggatcacttgagcccagaagtttgagaccagcctgagcaaaatggcgagcacctatctctaaaaaaattaactgggtgtggtggtgtatgcctatagtgcaagctgctcaggaggctgaggtgggagaattgcgtgagcccaggagtttgaggttacagtgagctatgatcacaccccttcactccagcctgggccatagagcaagaccctctctcttaaaaaaaaagaaaaaaagaagaagaatttttctgaaaacagttgatgtgaacccagccatactttttgtatactttggatcttgcatcatgacttgaacctttttgttggaaaatgtgggcagacaaacaatttcggaccacctctcccctttgcatatcagaggaatttgttgttttctttctcaataattagtgacacactctactccttcagtgtctgtcatatacctgagcatttacactgagtgcagtactcattcttttttaatcttctgaacattaggatctacatatgagttctctcctgggtggcacaactctctgtggaaggcaagactaagtgtcttctggaggcagagtatgactgtgctttccttaggccagaccaattccctcgaagtataacgcttctttgccccacttttgtgtaaaatcactcagtgtttttgcctggcagcttatgtttaacgatctctttttttttttttttttgaggcggagtcttgctctgtcacccaggctagagtgcaatggcgcaatctcggctcactgcaagctccgcctcccgggttcgcgccattctcctgcctcagcctcccgagtagctgggactacaggcacccaccaccatgcccggctaattttttttgtatttttagtagagacggggtttcaccgtgttagccaggatggtctcaatctcctgacctcgtggtccacccgcctcggcctcccaaagtgctgggattacaggcgtgagccaccgcacccggccaacgatctctttatgtgaaaactaagaagaggtgccctcggcttccatgtctgtttcagacttttattagacataaccaaagataaccattcatctcatggaaagtaactggacagatttttacttgcttttcataacacaatgagtcatagtacagtccatggaatgccttttagttgtaaaaattgtgtccatttaagttgctgcttccaagaacttcagtgattgatgagatttagaaagtgagtgtagaacggcctggataaaaaactaggccttggaaatgattccaaagttctttctagtacaaggggattccagtgtctaactgaaaagtaatgtgaagttatttggaaaattcagctccagagaaacctctggtttcttggatttttgatttgtgatttaaattttttttttttttctttttgagagacgaagtctcaccatcttgcccaggctggtcccaaactcctggctcaagcaatcttccttcctcagcctcccaaagtgctaggattacaggcccgagccaccacacccagcctgatttaaatttttattttgagataattatatatttatatatacctcttacccagtttgccccgacagtaacagtttgctggaaagaagatcaaattagccaccacattcctttacgccaaagcataatctggatcaaggccctaactctcttcaattctgtgaatgctgagaagagatgagggagctgcagaagaaaagttaaaaggtagcagagattggttcatgaggtttaaggaaagaagccatcttcataacataaaagtgcaaggtgaagcagcatgtgctcatgaggaagcttcagcaagttacccggaaaaacctaagataattgatgaaggtagctacagattttcagtgtagatgaaacagtcttatatggaagaaggtgccatctagaattttcacagctagagaggagaagtcagtgtgtggcttcaaagccttatgaaaggacagactgactcgcttgttaggagctaatacagctgctgacttttcaaaagttgaggccagtgttcacttaccatgcccaaagttccaggaccgttaagaattatgctaaatctcctttgcctgtgctctataaatggaaaggcaaatcctgtatgatggcacatctgttacagcagggtttactgagtattttaagatcattgttgagacctgctgctctgaaaaaaaagattccctttaaaatattattgctcattgacagcgcacctagtcacccaagaattctgaaggagatgtacaaggagattaatgttgttttcatgcctcttaacacaacatccattctgtagcccatggatgaaggagtaattttgactttcaagtgttattatttaagaaatacattttacaagcttattgctgccatagatagtgattcatttgatctgatgtgtcttagcaaagtaaatggaaaaccttctggaaaggattcaccattccagatgccattaaatacatgattcatggaagggggtcaaaacatcaacatgaacaggagtttggaatatgattctgaccctcatggatgactttgaggggttcaagacttcactggaagaagtaactgcagaagtgatggaaatatcaagaagtctattactagaattagaagtggagcttgaagatgtgactgaattgctgcaacctcatgataaaactttaacagatgattagttgcctcttatagattaggagagaaagtggtttcttgagtggttcctgaagatgctgtgaacattgttgaaatgacaatcgagcatttaggatatttcataaactttgttttgaagcagcagcagggttggagaggattgaccccaactttgaaagaagttcaagtgtgactcaaaggctatcaaacagcattgaatgctacagagaaatcttccatgaaaggaagagtcaatcgatgcagcaacttcattgttgtcttcttttaagaaattgccgcaaccaccccagccttcaccagccaccaccttgatcagtcagcagccatcatcaagacaaaaccctctgtctgcaaaaagattatgacgtcctgaaggttcagatgatcattagcattttttagcaataaagtattttaaaattaaggtatatacattgatttctacagacataatgctatttcacacttaatagactaccatatagtgtaaacataacttttatatgcactgggaaaccaaaaactttgtgtgactcgctttattgtgacatttgctttactgaagtggtctggaactgaacctgccatgtctcagagggccgcctgtgctagcattcatctgagtcatcgtcatataatgagatttgaatgggtgttaaacatgggaaggcactgtgcaaatcactcttcttgtttatctaaaattcatttccattaagtctggagtactggaaagtctaaaatagacataattctaaagaaatttttttattttcaagtaaaatagagtataattaggtactaaagcatggcatagggattcatcttggtatggcattcactgatacttgccttttaaaactaggagtcatttaattatttgaatggaaataagtactcaaaaacagcttgttcttaagcacttccaattgcttatgaatgatttttaatctatacacagctctttgtcatgtaaaaataaacttaagtatactctattttttcaaatttgtaaagccaaagtttatttttttattaatttactcaacagatatttattgtctgtgtaccatgtgtcaagtgctattccagcactgggaaaaccacagtgagcaaaccacaccatgggctacactgggaagggaacagacagaaagcaatcaaataactgcacaaccaatcaggcagttataagtgccatgaagaaaatcagggtgagcggtctagagagtgtgacagtggagtggctgttctttacaaggcattcaggagaggcctccaagacttaagcagaggtctgagggaggccagtgagccctgtagcaccaggggagtaggaggcaagagtcagtttggaaagtagttcttttcatccagtcttagaaggtttatcaggttgatttgtacagaaaactctagtaaagtaaatagaacagcaaaagaaaaaccctccacagcttggctcctgcctcctttttggtttagaagtggtttctctttgacatgatagaaattgcctactttccccagctttcattagaagagcttttcttagaataacctgcctcttagactgtagactagtgtttctgactgtaaagtgaaatatatccagtaaatgccacagcttctggtgtaagaaaaaatgcattaacatcacccagcaagagctgtgctttctttgcatttgctccctgagagaaaggcaggataccaaatgaactaactttatatttttgggtacaatgacttctattattatttaccaccctgttaagtccctttagaaacggtttcaaacatataatgaaaataagaattttaaaattgcttcactgtaactgagaaaaaaaatctcaatgttatgttcctcatccaccaaaggatcagcactctttacctctttggggttgggtaaccagtcagggagggtctcagaaatctttgttctattgatttatcaacctaagtatgatttatgtctcctgcgggtaagggaaaggggcttcctgtgttcacataaagaatgtgtgaaagggagacctttttcttccacattctatctgtgactgcttctctaagtggaaataaaatactttctaagtatttatcagctttttattgaccagttactaacaaggagataataaggcctttaaatatttgcctctgtactcccaacaatattttcagtatgctgggtagacagaaaaagctctgatcttagcaatgagtattctctgcccaactctcattatgtggacaggttttctagttgggaagatagcttttactttcatgcagtcttaaatgttttgtcagatttatttctaaagaaatatattttattggatttactatagagaaaatgccaataagttgaataggtctataaaagaaaagtgaagctttttatttacctaggtaatgatctgtcttgataataacacaatgcaatgggccctttaaaagctttttcctgctgtgattatatcatataccgaattcagagtatgtcatatcaaaatgaataatggcattctaagtgggcctctgaccgccagtttgctttcctgttctgtagcctctcctgtttgggccttcccattatttgatcatttgtggttgatttttgtttacatgtttaggtgatgatctttgaactggcttaccacgtgcagtcatttctcagcgagcataacaagccccctcccaagtcttttcatgaagaaatgctggaaaggcgggctcaggaggagcagcagaggctgttggaggccaagcggaaagaagagcaggaggtgagatgcccttgtcgatgtctgtgtgcatggccagcctggaggattgcaaactactgtaggttttatctgtctctgcctacaaacttatctttaagttttgctcagcctttgattcaagaaaggtagacacatgtgagagtatgaaaaatatgagtgattccctcctgacacatatcagtactgtcccttagagccctcagtccaggtcttaaagaaatagaagagaaaagaagctgtttaaccaaaccacctgtggtcttttggagcttgttagggtgtacaggagttcactgcattttagaagctattttcttcttccctgtgcaagactagtatctcatgcccaaatgagtagcaaaagccagagaataatttttttattcaaacatttagatgtatatattatctttgatttaaaggattttaaaaataagacagttaatatctacgcaaacagattaaagaaaaaatacaaagattaaataccatttgtatttaaatcaaagataatatatgcatctaaatggttaccatttgtattttataaactcctgtttatatcctatgctgagattctaaagatttgtttaaattcaagtttgtttaaatacaaatagttaccatttgtatttttctttaatctgtttgcataaagatataaactcttgtcttatttttaaaatcttttaaatcaaagataatatatgcaactaaattcccttttttattttaatttatttttctaaagttttaaattttttatttgttttttctatttagcactttaatcaacttatctagaacttactttgattcaggttataaaaaaagcctaagtatatttttcttagacattttcctaacacatttattaaataataattcttgaagtgattcataatactttctttaaactatatgtttaaaaatagtttaatgtattttaatattaacagcaaacgtgcaagaagtgcacagaagacagataacattaaaaacatgtacttgcatgtaggacaactcagttagaaaagtatactgaggccagttgtggtgtcttgtgcctgcaatcccaggactttgggatgaggcaggtggatcacttgaggccaggagttcgagaccagcctggccaacatggcgaaactctgtctactaaaaatacaaaaattagccgggtgtggtggcaggcacctgtaatcccagccactcaggagtctgaggcacgagaattgctcgaacccgggaggaggaggttgcagtgagccaagatcgtgccattgcactccagcctgggcgacaactagactctgtcttcaaaaaaaaaaaaaaaaagaaaagaaaagaaaaatatagtgaatgggtgtaatctactgtatgataagaatgctacaaaccgtttagttgccatcaataaaaaatgtacttattttgatccttctatatagttcataagcttgatgatcggtgttcacacacatgtgagatacgccacctgtgaaccttgttaggacatcagcacattacccatctgacatgaaagcagaagaaagaaagagaagaatttacttgtttttaaaaaaatccaaatactggcattatccagaaaaatgtaacaggtttatctataattattagaaagttaaactgccgaaacttgttcactgaaacattttgatttgcattaatgctttacatcccccccatttatattaaaaattcacacatgaatgaaaatagaaaaacggccaatacgtgatttctgtcccctctttttccactcacagtcatatatgtaggtaccttttgaccccataggaaaaaaatatttaacattcagaagtatcaggaataataagagaattttttgcggggggagtgaaatttcccatcatagtggattctttttgtttctttgtttgtttgtttgtttttgagacagactttcgctgttgttgccccaggctggagtgcaatgatgtgacctcagctcactgcaacctctgcctcccgggttcaattgattctcctgtctcagcctcccaagtagctgggattacaggcttgagccaccacgcccgacccacagtggattcttaagcacgctctccatgtatgtgtcatgctagctggatatctttcagcacaattgttacatgtttggcatggatagatagcatacaggttggtgttttcaaaaaggccaaccagataggcctcacttgccttctgcaaagcaccaatagctgcactctggaagcacagatctgttttaaaatcctgagcaatttctctcaccagatgctggaggggagtttgcaaatcagttcagtggacttgtggtaacgtctaatttcacagaatgccacagtaccaggcctgaaatgatcggtttcttcactcctccagtagaaggtgcagtcttgcaagcggctttctgtagccagtggcttcaacccaggaggcagaggttgcagtgagccaagagctttaccacctgtggatttgtgggcagtctcctttgtattatacaagccatggtatagagacctccttacttacccccttctccttctgctggagttataggtggtgcagcggcggctgcaaacgcaattctcaagtgcatcttaactgcttacctatactacgttctatttgtcaatgatctgttcaactcatctgttttttcttgaatctctaccacactctttgaattattgtatctttataatgctttaatatctgacaagtcaatcctacccctccccatcccttcatcttccattgtttttgtttctcagccattctcacccatttattcttacagaagatgtacagaattactttcccatagtcaaaacaaaacaaacatcctgggatttttattgattttaaaaaatcttacatatttatttaggaagaattgatatcttcacagtatttagacttcccattcaggattgtttctttttccatccagggctgtttgtttttgttttctgttttttggattttttttcttttttttttttttgagacagcatcgtgctctgtcgcccaggctggagtgcagtggcgcaatcttagctcaccgcagctcaagggatcctcccgcctaagctgcctgagtagctgggactatagccgtacaccactgcacctgcctaattttaaaatttttttgtagagacaagatctccctatgttgccaggctggtcttcaactcctgggctcaaccaatcctctggcctcaacctctcaaagtgttaggattacaggcatgagccaccgtgcccagcaccatttgtatatctatttttattttttgttgaggctttctaattttcttcctacagatattactatttcttaaagttacttttagtgttttgttcttaggttcttatgcttgtctcttttttcattttattttgtttctgcttcattttgtttatcctgtgcttacattaacactgtctttttgtaggtgccattgattttgttacttattttctatttaagtgtgtagcctagttattgttgggagtttgtagttcttttttattatttttattttattttaatttcttgagacagagtcttgctctgttgcccagactggagtacagtggtatgatactggcttactacaacctccatttctcaggttcaagcaattctcctgcctcagcctcccgagtagctgggattacaggcacccaccaccatgcctggctaatttttggacttttagtagagacgggcttttgccacattggccaggctggtctcaaactcctgaccttgtgatccatccaccttggcctcccaaagtgctgggattacaggcatgagctaccgcaccctgccgggagtctgtagtttattattgtccttgttgttaggaaggctaatttttattagaagatagtgactatttagctaacaattttgttttgacatactgctatagctacctataagtttggggtgtgtttttacacattgtattattgctgttatggtttttggtgaatctcttaatagttttgataattataatctggaattttagaggaataatgcaaaatagagatcaaaataccacttttaacattgagaaagctgattagaaaatacaggtgattgaagaatggcaggtaggtatggtacttgggccatggctacctcaggtgcaggcactgaggcttgctcagcccaccttcaccaagctgaccgggacccccatggcagagagcaggcacaagtgcttgttctctgcagataggcagatatcaaacaggaggagctaagacaagtgtcggaagaagtgagaagccaacagtgttgctgtagtggaaatctcctgcacatagaaacatgaagaatggggagtaaatgcccctccccacacacgctcaaacctgtttaaatgggaatgcctattgcgtaagaactctgataaaactgatagaactgcagtttgtactaagatgctgtgttttcagatctcttaggaagagagggtttgaattattgaaagttaaaagatttttctgtagttccataatttatatgttgtatgggtttcagagattggcatttgatgatggtttgatttatttcagcaacgtgaaatcctgcatgagattcagagaaggaaagaagagataaaagaagagaaaaaaaggaaagaaatggctaagcaggtaccctatcaactccaccataataatttacattttgcaaaacaaagtgtttttatttccactgatgacatctgtgttactatcagtaatacagcttaaaataaagcactaaaaataaataaatattcactgtgtatttcagactccctaaataggtggcaaaatttagagttttatgttgtcagtagatgatttagacttacataattactgtaatttatcaaatgagggagggaagagattgcgtctttaataattaacctggactaaaattgttcttttttttgagacagagtctcattctgtcgcccaggctggagtgcagtggtatgatctcagcccactgtaacctccacctcccaggttcaagcaattctcatgcctcagcctcccgagtatctgggattacaggcgtatgccactacgcctggctaatttttgtattttttagtagagatggggttttgccatgttggccaggctggtcctcaacttctggcctcaagtgatccacccaccttggcctcccaaagtgttgggattacaggcgtgagccactgcacctggcctagaattcttaatacttggaaaataaaatgatttgttgatactgaagagggaatagaaaccatatggatctgcctgaaatttcatccagtgatgaaaaagagtaattcaacagagcagatttaaaaggcagtggtgaaaaaggatagagtgctttttcctttatttttcctgagtctagctcaagcaaaaaaccagtcagacgtgtttggagaaattcagagaaaattttactcattctcttttacataaattagagcattaaacttaagggacatgatgtggtagcaggaagaggcactgaagcacaagcaagcttctcctggtttaaagcttcagctttcctgctgcctcactttgtgaccttggcaaggtgacattctctgtgactctctttacttgtcccttaaaatgggactgataatgcctttctttctgtcttgtataattacctccacagataagtgtactgccctatgtgaaactaaacctgcgtaaaaatgtaagatgagatccctgtttccaccagtgctcctgtcttgctcctgacctgccttcctgtcagccactctctgccctctctttgattctcccttcttctgttcatctcctgttactcttctccctaactttttacactattgcaagattctaagcattttcatttataaaatttacattttcttgaaaccataacctggacttcagttcttgagccagtacatatttaggcattaacatttttttaattttattttttaattgaccaataatagttgtatatattcatggagtatatagtgaagttttgatacatataatgtatagtgatcggatcagggtaattagcacatccgtcactgcaaatatttagcatttctttgtgttggaaacattcaatatcctccttctagctattttaaacgattaaaagttaagttcaattttatttcacttgtaaacattcagcttaaaatttgcattctatactgaattaataattatgtaccatgattttcttccatgtatgacttacatctaaagtaagttttacttttcttgttctaggaacgtttggaaattgctagtttgtcaaaccaagatcatacctctaagaaggacccaggaggacacagaacggctgccattctacatggaggctctcctgactttgtaggaaatggtaaacatcgggcaaactcctcaggaaggtctaggtaagtccctgggatttctgatctgggagaatgacagatgtagaaggattttactacattgaagatgtagtgaaatttgatggaaatttcaggcgatagtcttaataacttttttcaaaccttatatatcttaatatattagcaatatattaggtgtatttttagcaatatgaaactaaattgcgtttaacactttccaagtatctatcatgaatctagttttgttgctcattccctttttttttttttttttttgagacggtgtctcgctctgtcacccaggctgcagtgcaatggcacgggctcagctcactgcaacctctgccttctgggttcaagcgattctcctgcctcagcctcccaagtagctgggactacaggcatgtgccaccacacctggctaatttttgtatgtttagtagagttggggtttcactgtgttggccaggctggtctcgaactcctgacctcgtgatccacccgcctcggcctcccaaaatgctgggattacaggcatgagccaccacacccagcctcattcccctttataacagcctataacacatcacaaacttgccttagtacgatttaacatttataaacttaaattcagtaagtgattttaaaatttttcttccatttgaatcatcatcatccagtgtttcagtctacaatgccttaggtcccaccacagttgtaaggagtgcctgaaaatgagcacaggtgagacatctgttacatgagagtaggaaccccagttggctgccaggggtcccctccctaatactgaggtgggctcctgggctgttccctgtcaccactggtcacttaaaagatactacttgttcttctatatctttttcactgaagaattccaactttgctctctatttgctgtggccccctgtacaccagaaaggaattttggtgaagaaaccatttatgagtggggtgggttattaaatagtgtagggacttcaaccttcattgtatgtttaaattatctcttgtgagactctaagcacaacttaaaaccaccactttgcttccatgaaaagaaacattttaggcaccaaactgaagatttatataaacttctgtatagtttgtttattagaaggagccattttagttctttccctaattatctactactaaaaaaacagttcagaaatcattttgacactaatgtttacctactattaggtttaactaaatttttaaaaaaatactgtttctggtaaccattcctttttaagattataactccttcccaatttaaattatttttgaatctgggcttctaataagcaacagagtttgaagttgtcagagaatttcactaggaaatatctaacaaatttttgttgtattagaacctttgaattaaatcaatgatataaataagtcttttcagatatatggaagatgattgttttaagtttaaacatttctatttttgtggctaactataaacagtgaatccaaggttaggcttgtttttgagatcagagatagcacgctgggcacggtggctcatgtgtgtgaccccaacactttgggatgccaaggctgaaggatcacttgagcccaggagttcaagaccagcctgggcaacaaactccttcccatctcagagcctctgccgacccctctgcctggactactcaacctctggcattttgcttgctgagcccctccttctcattcagttctcccctcaaatgcaaccttctcagggatgccttcctgagcccccctctaccctatttccctgctttgtcccttgctctccaattctctgctttattttttacataacacttagcactagctgaaattgttattcacttgtttactttggaatgtgaggtctgtgagagcaaagccctcatctgtgttttcctcaaagcctgaaatcgtgcctggaagacacatggtaggtgcctggtcaacatctgatgcagggagggagccagggagggaagatgacacagggaaagtgggacactgtgtttctggtgtttgtagggtctacagcctctttaaccagggcagttttgcttctcttgatctgtggggtatgtaaaaaaccagtgaggttttatttaacaaaagatgttcacgctgaaaagaagagaaagagagaaaagagaaccactcactattctagtggaaagaacgtaaaggcctgatactcaaaggcttttcactgatgagtcttggcttttgttgaagaactttattttctgtgcttcaagtcttcttttcccaccttgaaggattcactttttagaatattaaggtaaaaatcaaaaaacataaaattagctattttaatgtgtacagttcagcgtgaggctgtatttgtgaagtgcagacatagtccccccaacccactgccttgtttctgggatgttgctcctcataagtgggcaatatgaattttgtagaagaagcaaaactaaaaaaccaaaaaacctctataaaatagctcatggtagaaaattaccttcacatattcagacttgctgtctttgcagattaccgtagtgtagcccagaatctagaatatatcacctatttatatctaccatcaacaagattaggttatctagtttgttttccctattctaaagccaggtatggtaactgctggctcctcacccttacagagaagagatcattaagggtataagacatgggattctctctgctctcctcaaaaaacttggggaaccattaaagtataaaggtgtaggggagagaggatccttgatacgtctctccagacatggtcctctgttgttcagtttctgtggttggttccatggaggcatagactggtttacctcaaattaaacaatatcaggaattcttactaatgttgtctctacaaagtggctctgtgtttcaaattaagggacctagaactagcattttctgtggcatcttggtgagttagacaggaaggtgagactatccctgcccctgtgtctcagataagatcctctttctccctcctgccccaacatctacacattgatcataatggtagagcaatcttttggatggtagcccaattctctagtccccacttgaaaaattgtcatctctcttcttgccacttggctttttaaaaaaaaaaagattatccttttttcttttttcaggtatcaagctcctagctgcctaatttagtcatctaaaattgtattatgtttctctgttctttttaaagacctagattaatactatttggtaattttatttgaaacacccttcatataggttgggaactgccacagatacttggcaaaactgataacatgggtgatatttttaatattatgataatattgcaaacctcatgaacatccatactctagaatagatcatgatgatgagaccagagtcatagcttctgaacaccatttgtttgcactgtttctgctggagtacagaagtcgttttacttatgaatggattcaaatccaaaaggttgttccaagcccagttcttgatgggtcccaggtagacagtataagcatccaatatatatgaatctttttggcgaaaacaatagatatggatgacattgcatttgtctctttattccttcttttcaaactctgtgatttactttttatccttcagaattgtttctgctacaacctgtgccatgcagcatgtaccacatttgtcgttttcttactttcacttttatctctacttttctttcaatcctagttattccttaatcttacagccatcaacactcattgtgtttgtacttatcagtcataatagggtgattcacattctaaaactccttaaaaccaagcatttacacattgtaaacttaagaacagaaagatggcctagactaaaatgaccattagcaccatctgctgaggaggccagagctgatgtagagatgcttctgcatagtttatgttactaagtctagcatgtaattttaaatctttgcttttatccttttctccataaatctcagtgtgtccctagttgcacacataactttagaagtagaaatttgaacagaactacaatgtatttgctgttttctgatgtttagaatatgtggacatgggccaggtgtggtggctcatgcctgtaatcccagcactttgggaggccaaggcgggcagatcacgaggtcaggagatcgagaccagcctggctaacacggtgaaaccctgtctctactaaaaatacaaaaaaattagctaggcatggtggcgggggcctatagtcccagctactcaggaggctgaggcaggagaatggtgtgaacccgggaggcggagcttgcagtgagccaagatcgcgccactgcactccagcctgggcgacagagcgagactccatctcaaaaaaaaaaaaaaaaaaaagaatatgtggacatatgtgtggtgtaagatatgagtatcataatacataatcttgtcaccagtgtaggaggggtttgaggaaagagaggatgtgtaggattggaagcagaaagaccagataataacagagtattgcatatgtccaggagaaagttggagatgaactaaacagggcaggggagatagagaggagaaggtggtacttgaagaccaattagatgcagatgtaggagcccaaggagactcacaggtttctcacctgtgagacagaatggatgactatgcccctaaccaaaattaaagagtcaaggggaaaaatcaggtttagagcgagtggagggagtggcagttttattgacgttgcaatggtgtgagggataaatagtgcagaagtggagacaggaagtgcagtaatgtgactatgaggaacaggatggggcgggtggtgcagggttgagggaggggaatgtatggatcagagagatttataggctggtgggagggaacccagagagaggggctgactgaacatctgggagaaagggactaactaatagactaagatcccagaggagacctttgtaggggatgggactgaggacaggggtagccatccttcctcaaagtcacccacaaagaaagaatagtgccaatgccaagtaactttataggaggaacaatagaaattgtggactgtattcctcttgcctcgtgttctcagtgaaagtaaaagtcaaaatcatgctgagaatgagagggtgatctctctagagatctgtccatgcacgtcatcgaagtgtttctgataagtgttcaatcctgaccatcaagagctctctcccttgcctcttccctgcaaccctctcccctaatttattgtttttgcattatgatctagtttcttagctcttgctcccaccagaaaaaaagtagaaaaaaagaaagagaggagaggctgggttttaagtgttttggagaagtcatggaagggaatgatgggaatatctaccaaagacaagcaagagaaggaatgtgcactcaatggctggaggcccagttggaaaccaggaatttgtggcagctccaaccccctctgttttgcagctttctccagatgtgcatgtgcgtgggaatgaagcaatatgggatacctgtggaattgatctaaatcactgctgaccagtagaactttttatgataatggaaatgatctgtatctgtgctgtccaatatagtagccactagccatgtatggctattgagtacttaaatgtggctactgcacatgagctgaattttcagttttattttaatagccacagcattgggcagcacagacctcgagttaggggtttgtggttttcatgtggagaagatgacaatgggaagtgggggaagtgaatggctttcccattagcaccgcctactcaattcccagtagaaacagatgttagactgcgagtgggctaataaacagtaataaacgggagaaaatggaggggcattcttgcctatgttaatctataacattcctatgttaatcttaaagaaaaaaatgaaaaatgattgttcaaatgtattgttcaaatttatttttaaggcgagaacgtcagtattctgtatgtaatagtgaagattctcctggctcttgtgaaattctgtatttcaatatggggagtcctgatcagctcatggtgcacaaagggaaatgtattggtgagtaaactagcaaaatctattcatattattgtaatggcaaaagttaatcacaaaggaatgggatggattagacactgtgtcattcagaccagtgcagtccaaggaagaccatcaagctggtagtcattctggctcccatccttaatgactggaatgagaaatcactcaggtttcctctaatgtaagatggaaataaaaacctgtgtttttgtctgggcaccgtggctatgcctataatcccaatactttggggggccgaggtggaaggattgcttgagtccaggagttcaaagctgcagtgagctgtgatcatgccactgcactccagtgtgagtgacagaatgagaccctgtctcaataaaataaaataaaatttaaaaacctgtgctcttggaatattattaacataacgatcattttaaatctgtcatcattataattatccaagcttattgaaacaaaaaaatgattaaaatattatcagtcagtagaattttacatcatatacagctaatgctgatcaaatgtatgtaacaaagtgaattctaatgcctatgatcttttttgttgttgagacagggtgttgctccatcactaggctggagtggtacagtggcacaatcatagctcactgtaacctcaaactcctgggctcactcaatattctcccctcagcctcctgaatagctaggactacagtaatgtctgtggtctttattgaccagatctcattttcttaagtggatatccatccatttggcattttcctgcttgacatattatacctgaccaagaagaccaccttattttctatatgccttatttagaagttttgtctactcgtggctgtttggcgtgaagctggttcagcaaatcagaatttgaattgctcatactaaagtcaagtttttggtatttcttcctttaccctaaatgtatgtcatctttacccagccttacagataaaaccagtaattggtatagaaaccatttgtacatagtgaatttggcaattaactttcattttcaatcccatgcatatttttgccagaagtaacaggtagccaaattatgtgaaatgagtttgctttcttttgggatcttttccccttcctctttaaggagatacaaataagcaaaagagttgccaggaagcagccagcaggtggagggagaagaaaccaaacttctcaataatctatgagctaaatacttaaccttggcagacacacagcagcctggacagtaaaggatcctgcacatagacagagctgccatatttagacaaaggaatcattgggcaggttcaagacattggtagtggtggttggctttagacctgagactgtccttgactcagacatttcagattcatgaagtgacaacataaaactacttctaataacctggggaaatcaagaaggcaaattaattcaattcttattaccttaacttagtctcttattctcactggtactcattagacagattcaccatagttaatacccttattaggaggcacattttcagttggagaatttttaataaaattaccaagtaaattattcattttgttttctcacagtgggtctgattttttaaaatatgccctaattgtctatgaaatgtttttataaaagattaactactaatttttttattttcaatgaagtatttttataaaaaacaatatttgtttttcattttaaagttgttagaactagacagaggagagaacttacttatagatatgactatagcactatagagactgtctgcataaatgatcattgtgggcatatagggtttcagttagagttcttttgataatgtattttctcttagcctcgtctcagtatattcttttgtcccttttattattcccatcatgaaaaactgacaagaagagtctggcaatactaaaattataattttttaaaccccagcaactatgaaatgcctgcctagtcccaattagggaaacaaatattgcaaaacactgtactgcataacacacaaatttaattaggctttatgtaaataacgtcttactccatcccataaacatttaatgccatgtgtttctagtagactgcttagatcccacatttctcaggttgcttcgtttggttgacaaatttttaaacagcaggattttttccccttaggcaaagactgtcaggagttatttatgactaacagatcattttaattaaaatctctaaattatcagcattcccatgaaataaaaactgcttgtcagataaaaagtcaaagtgagctagttcagccatatttttccaaagtatttttgctgagacatctttatcatgtatatgcaggttacttcacctttgattattcaaatagaaaagataattagcaatgtctctttaaaaatttgttttcattatgaagatagtatagcatcatggaaaactattatttatataagagaaaaaggcagattactatatatcggggttatcagctgggggccattttgtagcctgcaggacatttgatgatgtctgcacacatttttgatggctaacattggggtcggggtgctattggcatctagtgggtagataccaggattgctgctaaaatcctacagtgcacaaaacagctgcctacaacaaagattacctggtccaaaatgtcatagtgtcaaggtgttatatatatgctatgatatggtaaattatggggtaaaggagaatagagggaactaaaagaaaaataaaacaagtggtgatttttttctccttttccaattttttagaattttctattatggttttaatgaaaatagagatttttataagaaaatttttggtgttacagaaatttagctctccctgtgtaagtgagaaccatatgactatcactaaataaatgtgtctcattttctagcttcaaatctaaactgtcatctcttgttctttccttccaaagcattgaccagtttgtatttactgagcatattcaaattttgcacttagaaagtcattgatgtattcagattttcaaattactgttttactgtgcacactaatctataatgatctcgatggcttgttctctattttcatattctttctgtcattttagttggtatttagctgtatgagtgtacaccagtagacacagtcagcaaaggtagactcgttatgaaaataacattgtgcataatggctagtagcataaaacactggcctcttttgttttttgagacagagtcttgctcttgtcgcccaggctggagtgcaatggtgcgttgtaggctcactgcaacctccgcctcccaggttcaagcgattctcctgcctcagcctcccaagtagctgagactccaagtgcccgccaccaaacctggctaatttttttgtatttttagtagcgacggggtttcaccatgttgtccaggctggtctcgaactcctgacctcaggtgatccatctgccttggccttccaaaatgctgggattacaggcgtgagccaccacgcctggccaaacattggtctctttatttgcctgatactaagatctcattgtagattcttgccccttataaaaaattattttaggactcaggtatattgctaaatatcaaaaattgtttacaaaaggacattattacataaagtcctattttccatagttagcgcatggtatccattgttgaactaaagaatgtgtattaccccctcccttccttcccccaagagaaaacataccagtgggatttaattacactttctgtttaatgtgcaggcagtgatgaacaacttggaaaattagtctacaatgctttggaaacagccactggtggctttgtcttgttgtatgagtgggtccttcagtggcagaaaaaaatgggtccattccttaccagtcaagaaaaagagaagattgataagtgcaaaaagcaggtaagcatccaaggtggctgactgagcaaaaggcctaatctcaggctttaggagatgacagaacaaaatagccctgcatttgtttgccctgcagagatggtccagagcagtatgagaactgtttgaccagggaggacagtgaaggaccagtacctctttgccccttgcctctggtttcagaactttcacaacatgatcaaagcacttccagctgccttcttaacctcctttcttagcccttagtatggcattaacagtcatctttccaactgggactaaatactagttcataattgggtttttttgcaattcttcttttccctactcttgaaatattgcttcagggctgggtgtagtgactcatacctgtaatcccagcactttgggaggccaaggtaggaggactacttgagcccaggaggttgagaccagtctgggcaacatggtgaaaccctgtctctacaaaaaatttaaaaatctgtgggcatggtggcacatacttgtggtcccagctgcttgggaggctgaggtgggataattgcttgagcccgggaggctgaggtgggataattgcttgagcccaggaggttgaggctgcagtgagctgtgttcatgccactgaactgcaacctgggtgatagagcaagaccctgtctccaaaaaaaaaaaaagaaaagaaaaatactgcttcaaaactgaattttgggggaccggaggatttttaagttaatttataaattatgatttataaccaagcataaggagaacattcagtattgcatattgcagtgttacataataacaaggtttacaaaaacgtagataaagcatggtgttcagaaatgtgtgtgtatttaagtatagaaagaaaactgaaagtaaatgtgccaaaatcttgagttatcactgggtggtgaccacatagataacatgtgggtattttctatcaaactaattttttaaatgttgacaatgatctttattaaatcagaaaagattttttttttctgtcttcaaccttaactcctctttgccatgtgaggttctgaggattaggatgtggccattattctgctgctcaaatcatatactatatttttaaaaacccaaatacaaagctaatcagaaaaggttatttttaaattaaagtttgttttttctagtggctatacctcaaaagaattttattttaaaaactgttcactaattttgtagtatatgcatagtaggttttgagattagagaagttgagaattagctaaattttttccatctttatgaactattagattgaccatatggtttggggaggattcagtttagggcatatttgttctcctctcatttgaaagtatattttctatcaaatacttcacttttggttttggttttgtttttttatgcccccatcttgtatgatcaaatacttcacttttgaaatgaaacccaagttaatgttgactggcccaatattctttttttttttttttaacttatcagattcaaggaacagaaacagaattcaactcactggtaaaattgagccatccaaatgtagtacgctaccttgcaatgaatctcaaagagcaagacgactccatcgtggtggacattttagtggagcacattagtggggtctctcttgctgcacacctgagccactcaggccccatccctgtgcatcagcttcgcaggtacacagctcagctcctgtcaggccttgattatctgcacagcaattctgtggtgcataaggtcctgagtgcatctaatgtcttggtggatgcagaaggcaccgtcaagattacggactatagcatttctaagcgcctcgcagacatttgcaaggaggatgtgtttgagcaaacccgagttcgttttagtgacaatgctctgccttataaaacggggaagaaaggagatgtttggcgtcttggccttctgctgctgtccctcagccaaggacaggaatgtggagagtaccctgtgaccatccctagtgacttaccagctgactttcaagattttctaaagaagtgagtatcactgagattctctctaatagcactttactcctgtacttttgattgtgctggagtgtgccagacatctaagtgatgtggaagctgagaagtgaggaacaggacttcattctttgctctcccaatcctgtcctagtctcatatgttctgttttctcatgtaggttggtgattctcttaactaccacattctctgaaattcacttggaattcacacttgattttcaaactccttttgggggactgatgggatactcttggaagtcaatagagatggttatggtgagaaatgccctaggtattccaaatactgacctttgctctggttcctaaagggtcaaagacgaggctccttattcaaaaacagctttgggagtgagattctgccccttgtgcttcttaaccattcttcattggctgtctcattcatttaagttgtagaatgcaaataacttccttagtctagccagaggagtttcaatacctgtaaatcacaggtgcatgtttaattacaaagccaagttttatccaatttgggagaacccttcttgagatgtttcctcaggcctaagatgtttgtccaggtccttcacttaagtgttttctaatttcgtcctgcctctgttttcagtccaagccagagctaagttctgtcagtttctgttaaatgggagataagatcccttcagtctggatttttccagatgctcctctggtccagctatcctgcaggagttgacctgggctggtttcttccctttctgacactctttgttttttaccttctttttcccaatcatttgcttttattcacttcttccatttgcaacatttcttttacccttcacatttctttccctattccacctatcgcagtagccagttggcctggtttacattgttatgctctgtcactgatggtcttaccattacagatgtgaaagtagctgcacctgtgtttgagattgtttttgtgtaaagtgaatatgatatatatatatatatatacacacacatacatacagttgtggaaaggggccaagtttgattctttatgttggtttctcgccttgaagtatatgaaaatattaagatttctaaagaaatcttttatggtatctttttaatgcaatggagctttaaacatatttatttaaatgcaccctaacaatgaggttggccaaaatgacaaatatgatgatagaatcacagatggaaagtttcatttccatcttcaaaatgtcacctttagtgttctgccttcttcattgatgaagagtaatttagtcaaggttagcaatagcatcatgtgttgttaaaaacagtactgggaggtttaagtagaagtacctttcctttcccgtttagtagcaaaatgaatgggctcggtaggtaaaactttcctagttctcttcttaaatagctgtatgctctgtcagttttaaacttgagatcagcacaatttcttattcttttttttttttttttttttttgagatggagtctggctgtgtcgcccaggctggagtgcagtggtacgatctcagcttcctgcaagctccgcctcccaggttcacgccattctcctgcctcagcctcctgagtagctgggtctacaggcgcccgctactacacccggctaatgttttgtatttttagtagagacagggtttcaccatgttagccaggatggtctcaatctcctgacctcgtgatccgcccacctcggcctcccaaagtgctgggattacaggcgtgagccatagcgcatggccttcttattcttttaacaagatttttctttagactattttgtatacttctctccctggagtggtttgatagactgtgcttggttaaggagctgccaagaactgtttttatgaactttgctgtccagccctggttaacaaaagaaaaatgccattcacaaagaatgaaaacagcaaccttccatttgtagttatatttttacatattagtgaacaccctttggagcaagattttgtttcaaatcagcctctgtgatgggtaagactctggagtcaaaacatctgggttcaggtctcacctctatgtcctactggctgagtgaattaaccccctgccctgcgtttcctcctctgtgaaactgggataatagcactgcctacctcatgaggtggttgtgaggattaaattagttaacagccataaagtgcctggcacttggcccagactgagtcagtgctggttttcatcaccatcctcagtagtgagaactatgaagaaatgtgggtgttgccaggcattttatccctttttgttcaaagctgaaccttttctatatacggctaccctgttgccaaaattattgattcagagaagttcatttttaaagtgagatcttggtggctataaatctcttaaaaatactgtgcattctaggtaggctgtaacatttttctgatccagatttactttcaagtcaataacatttatgtcacagttgagttacagttgataacgcaattcagaaacccaacagggcatatatagggatgctcattgcagcattttgtgaaaatgtgaaaaattggaaataatctcaacagtaggagaatgtgtaaataaattctggtaggtccacgcctatacagaagtttaaaaaaaatctttaagtactggcttagaaagagctccaagacacatggtggaatgaaaaaagcaagctgaagaataatgtatataagatgatattgcttaaaaaaatcaaaaaacaatactattttgtttggatggttgtatgtttatgtgtataaatgcatagaaaaatctctacaatgagacaccctaagtggaagaaagaattggaaggggaggttggtcaaaggctttatcattatcagtaatgttttaatatttgcaaggagaaggtatatatgttttaatgatataattaaaaagtaattttaaatttaaaggaaaatacggtatcttatacaaatggttttattagaatttttttgcctgttcaagctatgaaattaggagtaccttgctttttactgctgcaacataaaaaaaagttaccatttatgatagttgctgtcaccactttgtatgtatagatttttaagtccagaactcacaacgacagttgattcttttaagtatattgttttaattataggtcaagtgctaccaagtcgtactacttgggccgttgtaatgaaagtagcttggcatggtggttcatgcctgtaatcccagcattgcaggaggcctaggtgagagtatctcttgagtccaggagttcaagacctgcctgggcaacatagtaagacctcatctctacttttttaagtattccagcacagcagggcgtgatacctcacacctgtaatcccagcactttgggaggctgaggcaggcagatcacttgaggtcaggagttcaagaccagcctggccaacatggcaaaaccccatatctactaaaaagacaaaaattagccatgcatggtgacactcacctgtaatcccagctacttgagagcctgaagcaggagaatcgcttgaacctgggaggtagaggttgcaggttgcagtgagccaagatagtgccactgcactccagcctgggcaagagagcaagacttcgtctcataataaaataaaataaaatgaaaataaataaacaaaacattccagcatggtggtacacgcctgtagtcccagttactcaggaggctgaggcaagaggatgctttgagtctaggagttcgaggctgccatgagtgatgatcgcaacactgctttccagcttgggtgacagagcaaaaccttatctcaaaaaaaaaaattaaaattaaaaaaaaaggccagcttaaatcagttacagtttaactacttagactttaacttagactttagcttgcattgaaatcatttggagctcttgttaaagcacagatcactgtccaaacctccagagatgctgatttactaggtcaggggtatagtagaatttgtatttctaacattttttaggggatactgatgctactggccagggaccccactttgagaagccctgggttaaaggtatggcttgtttttcttcattaaaaaacaaaacaagaattgtctattacaccattaaacagtaagttaatgggttcaaggaatgaagattaaaagaaagtatatgaggccgggcacggtggctcacgcctgtaatcccagcactttgggaggccgagacaggcagattgtttgagctcaggagttggagaccagcctgggcagtgtggtgaaaccctatctctacaaaaaatataaaaattagccaggcctggtggtgcctgcctgtagtcccagctactgagatgggaggattgcttgagcccgggaggcagaagttggaatgagctgagatcacaccactgcactgcagcctgggcgatacggcaagaccctatttcaaaaaaaaaaaaaaagcataaaccaatttttaaaaaaagtatgcaatagaatatgggactttaaaaaagccttccctaaatgtttccaacttgcttcatcctgtaatgagcaggcttcatctaaagctcgtcatactgagccactctgctgcaccaactctctgatttgctttgtctttcgaaagctttatttataaccggttcctgcaaaggcttagtttggcatgacaaggcattaaactgttcatcgaggtgaaaatttatagcctacttgtgctaccttagacttttaaaaaattgttccatgagggtaagtcttctcatctagagatgcctttttttgattcgcctcttgtacccagcctgtcgcatagcatgtaaatcctgcaggaatgtttattaatttaaattcacctatgagagtacattctggtctttgagtaacatgaattctataatgtgtatctttaaaaaataaacccatagttaatgccttggattaactagtttagcactgattgtttgtgatgctaagattcttccttccctctcaccgagatgtgtgtgcttggatgacaaggaaagatggagtccccagcagttgttgaaacacagctttataaatccccagccaaaaatgcctctagtggaacaaagtcctgaaggtgagtctgttacctttctttatttggtaacctgtttgacattaaattattttgaaagtatacataaaccaaaaactggaaggggctgcatgtgttattttatgtcttttattctgaactaaatccattagtttgatgtgtgccatgtgcatgggactgttttgccaccctgatttttctagtctctattgatggaatgaatgtccattgctgtagtctcttgtagtgtttagtcacccatagtgccatgtaactagatttttcctgctgcacctgagattaaggaacctcggtagagattgggatggatcatgagacctgagttttggttctagctctatagttaagtcacttattctatataatcccccacctgtaaacttgggctaattatatatttctgcctactttaaggagggcaaggtgaggaaaagttttaaaaggccactcaggtaagaggtaatttttcaaactactggttggagctcttcttccagggcttccatcattgttggctatgtagctcttcctaaatttccaatgcctcatgtgcctcttactccctgttttatctcagattctgaaggacaagattatgttgagactgttattcctagcaaccggctacccagtgctgccttctttagtgagacacagagacagttttcccgatacttcattgagtttgaagaattacaacttcttggtaaaggagcttttggagctgtcatcaaggtgtggtacagagtcattcccagtcccctttagagctccttctctgttccatttccacaaagactcatggactttacttttattttgggagtggggagggaagtgaatatggctgttggatactatgctcatcctcaccttcctggagttaaaggttttatttaagttacgctggacacagttgagaattgtcccactcctctttccttgcttcatgtggagcattaacatgaaacacacatggttataacagcacttcaagtggaatcaagacctccacagaaagaacatttttgtgtgctttggttcagaaagaacattgttctttttttctcctgtttgctgttagagttgctgtagataaaaaggttctaaggttagaagagagatggacttcaaactgggagatggccccagcaggtctcgatggcttttattttccagctattattgggacaggaaagtagcgatgtattattaaggtacactgttgttgggtcttcctttcttcgttctagtctatttgggtgacttttattattatctgccccttgtagaaagaggtttcagctgtttttatataatagaagtatttctttgtaaattaggagacccagattattgtattaagtccatatacagtacatgtcatctttcacatatgaaggtaacccaccatcaactgagtatattgtctgttaaggattctgagagtatcattaggaagcattactgttactgtagaaaaacttttacactaaaaaaggaattaaattagttttcctgtggtaaaagacagacaagcaagacagatgtcctgatcagaaagatcataattatgtctaagaggaggggatgattgaagcgtatactgtccctttaacacaatatcattttgatcaaatcctttaacttcattctattttaaattcttgaacgtagaatagtaacaaatttcatctctttacaagtacttaataatgataggcaagctcatataacaaaaacatctgagtaacttaagcccccacggtttccagtagtttctccctgtgagaatccacagccctcacctcctacctctgtgcttctgtgtcagagtagggcagcctgcccagtgatctggcattcattagcagttggacccattactgtttctgcaccttttcacttcagtaaatgaattcctaggggtttccagtatagcaagctttactcccaacccagttcgtatatgatgtgtactgagacaggagatcgaaaggcaatgccaagatccccacctcccgccctacactgtcctcttccctattaatgtggcagtaaaagaacacagggctatcattttttggagcacctgccatatttcagattgtgtgccaggtgatttacaaaccttgtctttaaatctcaggacattcttacgagatgggtatgatcctcattccctagatgagggaactgaagctcagagaaggttatgtcctttgcctgagataagggagataaaaccagcattcagacccacctctgttgtactacaaagtgtgtgttcttgtcactatttccatacaaaaaaagataatctgaaactcaattttgtagtacttccttcttattcccaggacttcacttagacttttattagtttaattgaaacttgtgagccaaacaagagaatgatattctgttttgtgttttgtaatcaactaatttctcctgccacccatggccacatggcatttgcttttctagagtatatcatcacctcagttgacctgcacggatgtgactacaaggtttcagtgaataagactctgtaaaagttacttcagtcaccccaattacatagtgaaactgcctggcataaggatgcctctatgtaggatgggaggacttgcctttgcaacgttttcttgctttcttattattttactgtgttgttaattgtattgttctggtttcagtatacatcatcttaggtatataacaaaatcaatgggcagtgattgtgttaatagcaattgctgttattgactaagctaagcacctttctctgtgaggccttgatacaagtgctttacagtcaccatttggggtagtggaaatggtataaatgccattttaaagataagaaaattgagtctcaaggaaattaagtaattttcccaagttcacacggctttagaaatcaaggaattaacctttgtgttcaggtctgttaatatttttggtgtttaatttgtttttagtgactttaagtgtaaaaaaaaatcagagagaaactaaaatcatctgaaactttacactgactttagaaaataatttttaatcttaaaatcaagacacttagaaatttagatagcagatacattggaaaagcagggaggtaactgtcagtaaaattaattattaaaatggagattatgttttccccagggtctcccagcaagctaaatatatctagagtcgggtgggctgttttctgaattttgtggcagtcaaagctttcttcagtttaagaatttcaggcatgtggttcttgactgtagctgtgggactcatttagaacttcacgctttccttgggaggggatggggtgcggtgcaaatgcctgtttgtgcaaggctccgagcggctgaccttcccctggctgtgccgcaggtgcagaacaagttggacggctgctgctacgcagtgaagcgcatccccatcaacccggccagccggcagttccgcaggatcaagggcgaagtgacactgctgtcacggctgcaccatgagaacattgtgcgctactacaacgcctggatcgagcggcacgagcggccggcgggaccggggacgccgcccccggactccgggcccctggccaaggatgaccgagctgcacgcgggcagccggcgagcgacacagacggcctggacagcgtagaggccgccgcgccgccacccatcctcagcagctcggtggagtggagcacttcgggcgagcgctcggccagtgcccgtttccccgccaccggcccgggctccagcgatgacgaggacgacgacgaggacgagcacggtggcgtcttctcccagtccttcctgtaagcgcacggcgcggaccagctgcctctgatgcgccccctagtttcctttctttatttttttttcctttttcctttcatttccttccttccttctttccttcttttctttctttccttttttgagatagggtcttgctctgtcacccaggctggaggtcagtggcgcgtccttggctgcaacatccgcctcccgggccagcgaatgccccccaacattaatccccaccaagtccaagccagggaaaaggggattcatttagaaatccagacgtgttgaccatgtttaaaaacaaaaacaaaaacaaaacaaaaccaccacttttagagagtaaccaaatgcaatctaaaggagcggtccccagcgtttttaggcaccagggactggtttcatagaagacaatttttccacagacgggtgttagggaaatagtttcgggatgaaactgttccaccttacatcatcaggcattagagtctcataatgactgctgaaaaagcgcacaacctggatccctcgtgtgcacagttcacaatagtgtttgcgctcctatgagaatctaatgcggctgctgatctgacaggaggtggagctcaggccttaatgcttgctcacctccggctgtgcggccctaacaggcagtggacctgtacctgtccatggcctggaggtttgggacccctaatctaaaggattttttttcccgctattttcaaaagatctccaaaatccaagccatggaaaaaggaaaattcaatacctcatcttatacattgaatagaatttctcataggacattcctttggataagggcttgcaaccctgtgaaacatttaagaactaatttggagtcttgatacagtgccaactgcagcccccaaaggtaccaaaccaataattatgatcctaaattttatgcttctcagaatccaccctggatgtttactttcatgattttgttttattttatccaagtggatacagtttatgattactcttcactattaaattttttgaggaaacttaatctggctaatttttattaaatcaagggttctgtgttttgcataatagcaagtacaaatcagcacagtgtagagtatacattgatgcctgtgggctcatggtgtgatgtctgtagcctcttgtgctttctagtatttaaaaatgtccatgtttataatgataatagggatttctgttcctttagtatttctgtttccctttttcaggcctgcttcagattctgaaagtgatattatctttgacaatgaagatgagaacagtaaaagtcagaatcaggtatatatatgaatagaaattatatcattttattcgtgatataattgacgtctgatgtcataaaccttaggtaaagtattaaggctttaatctgatattcagatatagaaaccataaattttaaaagatgattattcatttaaaatatattctacctgtgtttatttatagaccttctttatttatccacatagtaaaacatacctccttttagaagagaggagtcagttgagacactgcatttttgtatgtgatgaaaacagttttctaagggtttgggaaactttatatggttggggataagaattgaatgcaaattaatgaactagatttgcatttatggagttacctcatcatggagttaccttggtctgtcccacgtcaattaatcttgattccttattttcatagaccatcctctagaacagtgttttcacactgtgtatcgtgatcctataatgcaggggtgtccaagcttttgtcttcccttggctacactggtagaagaattgtcttgggccacacataaaatatactaacactaatgatagctgataagctaaacaaacaaaaaaatcacaaaaaatctcataatttttttttgagattgtgctgtttttttagttgtgttttcaatggagaaatacatcatctgttgacaaaatagcttttgaaaaatacgagtacagatactataaaacaaagcaaacttcagtcgtgagacactacatacatcatgtgaaagcaacagtctgatctccaggttgtgaaaactataattaaaaagtcactacacagaaaagatccaagtttccaggttggcaaaacttcggtgcagttacatgaaacgtttaacaaactgatttgttttccccaatgtgtaaacaaaatgacaagactaagtctgtgcctggtaatttcaatgtaactctgaagctacacaaaacacacagacaccttatacacttcacctgttagtatgaccatcttttttgttaggtggtgggaggaagggcaaggtgactgtgtaaagcaaagatgtgggaagtagaaatattatgtactagacgttataaaatcatggtgaaaagaaagctttgattaatgcgtagcctaagggggaaaagactacactccaacttcagaaaattaatttagaaggataggggaagagattaagtaattgcagtttaacatgaaaaatgcacatgtgatagaatggagcacaatggaagattcataaaacatgctcatcagaaaaatctgttaagtttactttgtccagattaagaaagagtaagtttatcaacatctggcatccctcatactttgtaaagatagatcttctgctgcttaattatgagaaattattttattcaaagaggggagcttgtcaagtgcttgctagaaattatttttaaaatgcttctacatgtaaaatgtactgacaaattttggtaaaccatttaaaaataagaattagttttgaaatcttggagaaaatgtctttttgcccacatttaaaactgaaaatcaattttactatagacaggagttctgtggagtatacaaaattcctcttagaaatcaaatggccatcccagatagatatcaagtttcacaggcattacttttagtcagtctcaagtttcagccacgggaccaaaatttagtgttctgtaccatgttggtttcacatcacggcttaagaaaatactgacattttgtttcttatgaaataagtcctatcttgtgcatacaagcaaaaagaaaaaggaagaaaagaggggaggggaaggcgcaagaagctcttttttgtttgttttgaagacaacagattgaaggcaaaagaatacagagctttcataagctcaaagaaaaatatttgctggctagtcgctgatttgtatgcactataaaacattccataaataaaactgatatatcatttcttaatcatgaccccatcaaaacgaagttatttcctaactattctttcaacgtcaatgtaccctagagttgacatttcatttttaagggttgcagctacctcataggaactgaaatagacgtacgcttaccctttctctgaagtataacagtgcacaatggtatccaatttgaagactaatggtaaagaaaattcttcagaaaaaactgaaaatccatcaagctgaaaatctataattagttctactttctaataaaaagtacataaaagtacatcatcagaataaataattcttatgccagtttgtattgcaaattttccaaacaatgcatcaaacataaacccaatccagatgtcaattgtgaatacaaatagagcttgaggttgtttttattaaaggcagtaatttttgaaatagttaatgcaactgttgctaacacaataataggactcctggcctcacatactaacctggacttctgatcaagtgctaattagcccagtaagggaggtcaccaaaaactactagggcagtcagttgtggctgtggggaattattctactattggggactgaatgcaacaactttattactattattattttaagaggcagggtctccatctgtcacccatgctggagtgcagtggtgcaatcctagctcactgcagcctagaactcctgggctcaaatgatcctcctgcctcagcctcccaaagtgctgccattataggtgtgagccaccatgcctagcctgcaatgactttattaccaggaataaaaatataattaccagcagttacaagggttcattcatagtaaagaaaagtctaagtgtagactcttaaataagcagttcaatgtatttgaaggagatctgagtattagccagtgtgtttttctataagtactttccttgtcaatgaaatcactactaataaacatttattagttataaatttaaaccaggaataatagcataaataaactatgttggctgcagtggctcacacctgtaatcccagcactttgggatgccaaggcaggtggatcacctgaggtcaagagtgagaccagcctggccaacatggtgaaaccccatctctactaaaaatacaaaaattagccaggcatggtggcgggcacctgtaatcccagctactcaggaggctgaggcaggagaattgcttgaactcaggaggcagaggttacagtgagcccagatcacgtcattgcactccagcctgggtgacaagagcgaaactctgtctcaaaaaaaaaaaaagtctgaactactgctaaagccaaagttaatgtttggtgttagcatttgttatgcacataattattacaggggcaccaaatcctggttttgctcagttaagggcagcatccatgggcatcctaattgatgggtagaaacctccaagagattaacagtgtaatacagataatccccagcatccataaatgattcaggagtagaacctgattgttaccagagcagagcttttttttttttctttgataaaggaaaaagttcaaaaaaattcttcctcagaaaaaaattataaatcagaaatggtcaaatactaactaatactttttctgcacttggtgttataagtattcaaatacatctattgagggaaaaagacttttttaagaaaagtatcatgtatgagaaagaaaattagctgttggggacaaacagagtaatggtatgggaagtgtcctagagggtcattcactgtaagtggcagctgagggcatgttcttcaagcatgtacctctgagggcagtgtgccctttgataatgtggtcactttttttttttttttttttgagacagagtctcactcatcgcccaggctggagtgcagtggcacgatctcggctcactgcaagctccgcctcctgggttcacgccattctcctgcctcagcctcccgagtagctgggactacaggtgcccaccaccatgcccggctaattttttgtatttttagtagagacagggtttcaccgtgttagccaggatggtctcgatctcctgacctcgtgatccgcccgcctcggcctcccaaagtgctgggattacaggcgtgagccatcgtgcccagccatcacttttaaattgttttacctaaaggtggatttctagtcttctgtttctgaactaagcctaccaccaaaaaatatggaattccagtaaaactgaacccttcaaatattagcctgtatgcattctgaccttcttagccatagatggttatcagcggtaagaaagaattgacttgacaaggagtttttctgtttaatacctgcctattttctgtttactgtatcattgttctgtgtagcaacagacctgtaaaccacacagaggatactggaaatagcacattttcaataattctgtgagcttcttttttttcctttttcttttcttttctttttttaattacacttaagttctgggatacatgtgcagaacatgcagttttgttacatagtacacatgtgccatggtggttgctgcacccattaacttgtcatctacattaggtatttctcctaaagctatccctcccctagctccccaccccctaacaggcaagccccaatgtgtgatgttcccctccttgtgcccatatgttctcattgttcaactcccacttacaagtgaaaacatgcagtgtttggttttctgttcctgtgttagtgagaataatagtttctagcttcatccatgtccctgcaaaggacatgaacttgttctttttttatggctgcatagtattctatagtgtatatgtgccacattttctttatccagtctatcattgatggacatttgggttgattccaagtcttcactattgtgaatagtgccgcaataaacatacgtgtgcatgtgtctttatagcagaatgatttataatcctttgggtatatacccagtaatgggatggctgggtcaaatggtatttctagttctagatccttgaggaattgccacactgtcttccacaatggttgaactaatttacactcccaccagtagtgtgaaagcattcctatttctccacatcctccccagcatctgttgtttcctgactttttaatgatcaccattctaactggagtgagatagtatctcattgtggttttgatttgcatttctctaatgaagaccagtgacgatgagctttttttcatgtgtttgttggctgcataaatgtcttcttttgaaaagtgtctgttcatatcttttgcccactttttgatggagttgtttttttcttgtaaatttgtttaagttccttatagattctggatattagccttttttttttttgagactgagttttgctcttgttgcccagggtagagtgcaatagcacgatctcagctcaccacaacctgcacctcctgggttcaagtgattctcctgcctcagcctcccaagtagctgggatcacaggcatgcgccaccatgcccagctaattttgtatttttggtagagaaggggtttctccttgttggtcaggctcgtctcatacgcccgacctcaggtgaaccgactgcctcggccttccacattgctgggattacaggcatgagccaccgcgcccggcctggatattagccctttgtcagatggacagattgcaaaaattttctcccattctgtaggttgcctgttcactctaatgatagtttcttttgctgtgcagaggctctttagtttaattagatcccatttgtcaattttggcttttattgccattgcttttggtgttttagtcatgaagtcttttcccatgcctgtgtcctgaatggtattgcctaggttttcttctaggattttcatggttttaggtcttacatttaagtctttaatccatcttgagttaatttttgtataaggtgtaaggaagggatttggtttcagctttctgcatatggctagccagttttcccaacaccatttattaaatagggaatcctttccccattgcttgtttttgtcaggtttgtcaaagatcagatggttgcagatgtgtggcattatttctgaggcctctgttctgttccattggtctatatttctgttttagtaccagtaccaagctgttttggttactgtagccttgtagtatagtttgaagtcaggtagcatgatgcctccagttttattctttttgcttaggattgtcttggctatacgggctcttttttggtcccatataaaatttaaagtagcttttcctaattctgtgaagaaagtcaatggtagtttgatgggagtagcattgaatctataaattactttgggcagtgtggccattttcacagtattgtttcttcctatccatgagcatggaatgtttttccatttgtttgtgtcctcttttatttcattgagcagtggtttgtagttctccttgaagaggtccttcacatcccttgtaagttgtattcctagatattttattctctttacagcaattgtgaatgggaattcactcatgatttggctctctgtttgtctattattggtgtataggaatgtttgtgatttttgcacattgattttgtatcctgagactttgctgaagttgcttatcagcttaaggagtttggggctgagacaatggggttttctaaatatacaattaagtcatctgcaagcagagataatttgacttcctctctttctattttaataccctttatttctttctcttgcctgattgccctggccagaacttccaacactatgttgaataggagtggtgagagagggcatccttgtcttgtgccgattttcaaagggaatgcttccagcttttgcccattccatatgatactggctgtaggtttgtcataaatagctcttattattttgagatacgttccatcaatacctagtttattgagtgtttttagcatgaaggggtgttgaattttatcaaaggccttttctgcatctattgagataatcatatggtttttgtcattggttctgtttatgtgatggattatgtttattcatttctgtatattgaaccagccttgcatcccagggatgaagctgacttggtcgtggtggataagctttttaatgtgctgctggattcagtttgccagtattttattgaggatttttgcatcgatgttcatcagggacattggcctgaaattttctttttttgttgtgtctctgacaggttttggtatcaggatgatgctggactcataaaaaagggaggagtccctctttttctattgcttggaatagttttaaaaggaatggtaccagcttttctaactaccatcagagaataccataaacacctctacacaaataaactagaaaatctagaagaaatgtgtaaattcctggacacatataccctcccaagactaaaccaggaagaagttgaatccctgaatagaccaataacaagttctgaaattgaggcagtaattaatagcctaccaacccaaaaaagaccaggattcacagccaaatgctgtgagcttctaaggatagtggttatgttctgctcactgacttctccctaaggcaactgggtggccctgtgttgggggtgggcacaaatacttaatgatggtgatgattttgcttaattttggcctccattttgagttattgtgtgttcgtcttgggttaggatgaagattgcaatgaaaagaatggctgccatgaaagtgagccatcagtgacgactgaggctgtgcactacctatacatccaggtgaggtcgtggtgtgtagttaggtgacacagcaacacccagtagtggcgggtgggcctgtttcagggtattagaacaagataatggacagaggagggcttattgccactaccaaagattaattggccgagaggattaccatatggaggcccttttccccagccttgaactcatgctttcctgccacatatcaggagcagccacagggcagctctgggctcaggctgtgtaagttcacatcctggatccacctgttaggactgcatgaactcgggcaaggttcttcagcatcttgtgcctcagtttccccatctataaattacataatagtagttcttatagacttgtaaagaataaataacatgtgaagtacttagaaccatatctgagttccataagtgctagactgcatgagcacagaaactctactttgcctaaccacctgaatctggacaagtaagatatgatgtgcacacatgcctgtacatgcaaaagtaacaccaaggtgactttaggcaaagtggcttgaccaggaacctctggagaccagtgcacaggcaagccagttccaatggggcatgactgagaagtctgagctttggcctgcctacctgccagagcaacaacatcctaaacaggggtgagtgggctcttccagtagaggagtggccataaaacaagttggccgggcacggtggcttacgcctgcaatcccagcactttgggaggccgaggcgggtggatcacctgaggtcaggagtttgagaccagtctggctaacacagtgaaaccccgttactactaaaaatacaaaaaattagccaggcatggtggtgtgctcctgtaatcccagctactcaggaggctgaggcaggagaatcacttgaacccaggaagcggaggttgcagtgagccgagattgcatcattgcactccagcttgggcaacaagagtgaaactctatctaaaaaacaaacaacaacaacaacaacaaaaacaaagaagtctttcctctgccccaagggaacaggactgtgggtcactgttagtatttcagtcataactgcaagcaggcagatctttaaatgtgagatacagaactgggcagaaaaaggaaccctcgacaagttacagcattttgaatgagatgaattaggtatttgctttcctggagttggagctggttttaggtattccgtaacataaatatctttgaggtaccacttacacagataataaagcattggtcccccaaaccactgtttatcctctattatattccattaccttctacacaattagaatgagatagaagtacacaaaggaggtgcatccgacatgcatcaggatcacggtgtgggcatcagagggggccttgtgaggcccggagggtgaaccagagtttactgacaattattccgaaggtgatagaacaaagtctggtcttcctctctttaaaaacaataaaacctttcttcgtgagaaatctcaactctggcactagttgaagcatataggctagtttcataaatcaaatggtgcatgttgatttaagatttaagtcatgttgcactgttttctgatatgtgaatacactcaagaaggggtgagacagagcccctgtgtcactgtcccaagaagacttgaatgttttaatatttataatatttttctctaaacttgaaggtcatttgtgtttaatgtaagaaaagctaatgatataattaggttaactaaccctccttgtaaatttgggtttggaagcgatcttgtaaaacaataaataaaattttacaacattctcagttttttatgttaattgtgataagtattttaaacaagtcatatttttaaatgagcaataatataaaaaattaaaaatggttatgttggagtgccaagagtatgcatatttacccccaaggtattttttaatactgttggtttctttttcgtgtagaaaaccaagtctttcccctaaccgtttaaaacccatggtacacgttttaaaatggaggattatgtaaattgcagttatactccttcacttaaaactgttgtgtaatcaaattctcctggtttgtctgtatatagatggagtactgtgagaagagcactttacgagacaccattgaccagggactgtatcgagacaccgtcagactctggaggctttttcgagagattctggatggattagcttatatccatgagaaagtaaactttacaacatttcatatctgaagacttatgtttacataaatttatgactgcataaaaatatcaaatgtaagattggagaaaaactgaaatagagggaaagctatgggtatattgacataatctatttttgtaggaaatagaacaaagtgtcaaagacaataaagtattacaaagtatcagagtataacattaaaaaatgttaagaaaactttaaaggttaggacagggatcagcaaactgtggcccacaggtcaaatctaacccactgcctgttcttgtatggcctgtgagctaataatgactcctatatttttaaatggttgtaaaaaattagaagaacatttcgtgacacataaaaattacatgaaattcaaatgtcagtgctcccaaggttattggaacatagctatgctcattggtttacatattgcctatggctgttttttttccataccagcagatttgagtagttgcaacagggactgtaaagcctaaagtattcactctctggccctttacagaaaaaatttgttaacctctgggagaggagaaagtatttgaacatgtagggaatatgaggatgattccttgagtgctttagaattagggccaggtgcggtggctcatgcctgtaatcccagcactttgggaggtcaagatgggcggatcacttgaggtcaggagttcaagaccagactggtcaacatggtgaaaccccatctctactaaaaatacaaacattagctgagtgtcgtggtgcacacttgtaatcccagctacttgggaggctgaggcaggagaatcacttgaacctgggaggtggaggttgcagtgagctgagattgtaccactgcgctccagcctaggtgacagtaagagacttcatctgaaaaaagagaaaaaaagaattaagcaaggatgtgattaatacctgccaagttacttgattctaactgaattagtgccacccttcctaggaacacggggaaaccagaaggtcatctagcaagaagagaaatgagactttctgagtaacttagcttgtcgcatgtctaaaatgtcattttaaagctagaaattgccattataatataaatgctaatgggcctagcttcaggatgaaacactgcttacatttttaaaatgagattgtctaatgcattaaccaatataaattcattatttttttcctttgcctcaaatttctttaaccttaaaatgtttgtactgtaccgtatttatactgagaagcaagggctgtaatttacacatgtgtagtttgtaaatgatttggtagaagcagaatttgcaaggttagaaatgaaaatgaattctaatgagggccatttaagctgtattactgtgattttatcctgggatgctagaacaatgccccctgtgctctattccactccatccaatttgctcagtattggctaaccatttgctggcatctaacactgtgccatacctggaaatacaaggaggcacaagtgtgtgtcccgtgcttgagagggacttcttgctcttagagggacccagaatttaccttcatgtaatggtaaaagagatcattattttctctattataatgcatgaaacaatacagattatgagccattaggaaaatgagaaagcagtctcatgtaacaagtaattgttgcacacctactgtgtgtgctggggatgccaagttgaactgttagaattactgtggaaggctcatgaatgagttggcaattgcaaatgttggtatagtgcaaatgcatggaaaaaagcgagtatcctacgaaggggagagggtacaaagaaaggaatagaagaaggaataaaaatggtgtgtctccctgaccagaggagaggttttgtaatgcagcagaggtaagggtaacttggtgaacccagtggaaggggccttggatgccacagggaactatttagaattcacctggtcaggataccaccaggtagaactaggaaacagtaaagaggtcataggacagtcaggacatattgcagaggccagacagcctggaccagggtggtctgtgggagaagacctcatacgattttcatcgctaggttggccttttaaattaggaagtaggtataactttatgcatggaaaaccattgtttgtttcttcactctctttcaacagggaatgattcaccgggatttgaagcctgtcaacatttttttggattctgatgaccatgtgaaaataggtgattttggtttggcgacagaccatctagccttttctgtaagtattttaaaaattagactgtacctaaaaacagactcagatgtcttgataatcctggaagtgttagcggatagaatagtgcgttcacagaactatgccgtctaatcctcaggagattatacaaacctgaaggggtatgctgcaaatgatcttgtaggctttgcaattgtgagtatatttttttgagtgcattccacttgagggacacaaaattattggcttgggaacaatattgtggtcaaaggtgtacagtactttatgaaatcatttggtattttggtctaccatgcctggcactgggctagatgctttatacctcagaggcttttgttggtttggggaaatgaggctcaaaaacgtaaaacaccaggagaccatacagttgtaaggctcaagaaaggctggataacgacagtggcatttcagatgtccttaaatggtggttgggagtccaacaggtggaggttgagggcagggcctggtggccccagggtgggaattccagagagagcacagcataagcagaggccccggggtaagcagacttggctgtcggaagaccagcatactgtctgactggtcgaaactgtgaggtgcaggggagagtaagaggatgcggggcagttgaggagtcactggaaggttgggcagtcttgtaggtggtaggctttgaatgccagaggaggaattttgcttcacattataaacccaagttattaagcaccaagatctgtgggaaatgcagttaattccaagggtgatcaggaaaggaaaataggatttgagttaatggtgagaataaccactggggccaagttagaaggtgagactaggagtggaaagggaggagagggaaggcagacagtacggacagggtcccgatcatgctccccatggagtatatgggagagtgctgagaccaaggacgggccagatggtggggatcttgatccccaaactaaagaatttaacttgatatctggaaggctgtagcatagtgagatagataagagctcaggctctggaatctcactgacctggactagaatcctatctctgccactgctttgtagcatgatattggacaattaattaacttctcaatacctcatttgtaaagtgtgcctaatactagtgcctagctgaaaaagttatcaggaagataaataagaatgcaggtaaagcacctagaacagtgcccagcactaagaatgttgaagccggtgttactgatggtgatgcttgtaatgggaagcacctattacaagtgcagacataacaatagtgacttagggtattgacaacactgttgcacatagtggagcaaggtgaggctacctggggggcattagccatgagcgagggtggaacatatttgctgagcagcctctaggaaagaagaataaaaattgatgcagagaaagtaacagcagtgggtaagttgaaagatgaatttgttgtttttaatataatcttactcttcttagaaaacagattctgtttttggcatttgcaacatgaaaataaattggtttctctaagtgtttgcatatttctgtcctaaagaaagagttgtacagtgattgcccccctccctcttgatttcattgggttttctgagagccttgcattagtgggttaactaaactagaaaaaaaattaaaactcaaagcgttattatattattttgatttccatgtaatatttcctcagtcttcatttagaaacagacaagccattctcatggaataatatcatgttttaattggatatttggcttacttatatttttaggctgacagcaaacaagacgatcagacaggagacttgattaagtcagacccttcaggtaaacccagaagactatatatttcatccatgtgttaaagaccccagaatttcttaacctgaaacctgttttttacttgtaaaggttttattctacggcagattttaattgctccttaagttaacaaaattatggaaacgttttaatctttttttccttttcaatttatgaattattctttgaactttaagaaattagagcttcagtgagtagaataattggctcccaggggtagacagttttattttgtctaacctccattggtaatgtgaggttacctcatgacctgatccatctggggtcttatctggcactgtccctcctcttcaatagcaaagacatccttgtgtagaaccgaatgtgtggccatacgtgacttatggttattcatttggtacaatgcatgctctgcttcctgtgagtggcatagacagttaacagatcatgcctcacttttaagaaacctttttttgtttttagtttgtgtcttctgtaagtgctattattgggacgttttccctctgttttcctccacacaggtcacttaactgggatggttggcactgctctctatgtaagcccagaggtccaaggaagcaccaaatctgcatacaaccaggtaagaggttttgtggggaaaaggaatctcaaaattaaggtaataggacatctagatcacagcatttgggatttagtcccggctaaaatagtcaagacatccactcattcacactccaggaaggactcatggtcctaaggatagtgactgaaactggcactgctgctgccaggagcttacagtccatccatccatccatccatccatccatccatccatccatccattcatccatccatccatccatccatccatccacccacccatccacccatccatccacccacccatccatccacctgtccatccacccgtccatccacccatccatccactcgtccatccgtccgtccgtccatccatccatccatccagccatccatccatccatccatccaaagaatgtgcaaaccaacccctatcttgggcaaggtgccaggaacagatgtggctccagccctcagggagcttgtccactggtggatgaaacagacaacaaataagtaaaaaataaaagatatagccacaaattgtggtgagggctaggaagaaaagaaatggaactgagtgacaaagagaacagattgaccagggaagatctcttgagaggatggcatttaggataaaggatgagaaaggacaagccacacagatttgggggctgacacatgccagggagggagatggtaaggagcagaggaaactgcacacataaagagaaagccctgagtgagagagacagcttggcacatttaagacagccaaaaggaaggctagtgtggccacagtgtggcaagcaacaggggacagaggcatgaagttaagctggaaaagaaggcagggaaagatcacacagagccaggttggcctggataaggagtgtgcatttaatttgaagtacacagggagccagtgaagaatcttgagcaagagagttcactctggctgctgcgaggaggctctgcaggaagtcctggtaaggcggttggcagctggaactggactgcaagcagtagaaatggagagaagtgtgctgaattaggaagggaattgagagattttcccaatggaagggatgttggatgagaattaggaagggatttgagagattttcccaacggaaggaatgttggatgagaatgaggaagggaaagagtccagggctcaggtttctttctggaacacctgggtgaagagtatttgactgaagtgaggaaacctaaggacagacataagaggaaggaggagaagatgacagaaaaattcagtttgaggcatgttagtttgaaatatctgatgagaaatccaattagagatttcgagtagattgttagagacccaacacttgagttcagaggaaaggtgagaatcagaaggataaatttgaaatcagcacacagataggatttaaagctatgagactggatgagatcacttagggcaagagtgtaaagctaaactttaaaaacacattaggtgccaggcatggtggttcatgcctataatcccaggactttgggaggctgaagcaggaggattgcctgagctcaggagttcaaaaccagcctgggtaacatagcgagacctcatccctactaaacatcaaaaaaattagccagtcctggtggcacacgtctgtagtcccagctcctcaggaggctgaggtgggaggactgcttgaggccaggagattggggctgcagtgagctgtgatcatgccagtgcactccagcctgggcaacggagcaagaccctgtctgaatcaattatatatgtgtaaaataaaatacattaggaaagcaatttgcatcaaagcaaatgctcaggcttgcagtggagattcaagcctgggttttggttctgacagggagcattggacaacaacataaagttgaaacagacatctaagtacctggtgagggtgagggttagggtatcaggagatggactgcacacactgtgagtgtgggcagacacctttagtgtcattattattattattattattttgagatggagtcttgctcttttcgcccaggctggagcacagcggtgggccatcagctcactgcaacctccgcctcccaggttcaagcaattctcctgcctcagactcccgagtagctgggattacagacgcctgccaccatgcctggctaatttttgtatttttagtagagacagggtttcaccatgttggccaggctggtctcaaactcctgacctcagatgatccacttgcctcagcctcccaaagtgctgggattacaggcatgagccactgcacctggccgtatatacatatttttttaaaaaaccaaagtgggggcatcttagacatcagtaataaatatccctgagtggtgggatcatgagattgctattttattcttggtgcttttgttctatgttttctatagccaacacgtataggaaatgccacagtgaatgtttttaagatgtcggaggtcaccagtgacaatccaagagtctcgccgccccctctttgagtccaaatgtattcaagagtattgcttgaaaatgttttccattgtcctgaaagcggctctacaccctgcacctctgtgcccctgaccatgtgcagtcttttcctcggcagctgtgtcatgctcggtttcctcagatgcactcccttcccaacgccatcttctccttcgtggcaccctacttagattttctctgcactgacttgcctttttgcttcttttttctttttattgtagatactttttttgtttttgtcaattatttaatagttatcttgattatttatatccttctagttttttgactttagtgtttttttctgtagctttttatttttatttattttttatttttttcctagcttatggaggtatgattgatgaaacttgtctatatttagggtgtacaatgtgatgttttgatatatgtttacattgtgaaatgattaccacagcgaagctgaccgacatacccatcacctcacctggtttccattttttgtgtatggtaagaacgcttgagagctactttcttagcaaacctcaagaatacaatgcgttattattaattatagtcaccatgccgtgctttagatctccagaatgtattcattttataactgaaaatgcgtgccctttgaccagcacctccccttgacccccagtccccagcccctggtagccatcattctgttctctgttactgtgggtttgacttttatttagattctacataccagtgagatcatgtagtatttgcctttctgtgtctagcttatttcacctaacataatgtcctgcaggttcatctatgttgtcacaaatggcaagattctcttctttttgaaggccatatgaccctgtagtcaggagctggccttttctatcagccgcagattttggtctgtgtttcacttttaagatggttagctaagatgtgaaacaaagcaaattcttatgatcaatctcagttgtccttgctcttcagccattatttccagttttcagccagtggttttctatgtctgtggatacaactaaaccagttaccattaattttctaggaaggccaggcgtgttggctcatgcctgtaatcccagcactttaggaggccaaggtgggtgaatcacttgagtccaggagttggagaccagcctgggcaacatggcaaaacccactctgtacaaaaaatacacacaaaaaaattagctgggcatggtggtgcacacctgtagtcccagctacttgggaggctgaggtggaaggattgcttgagcccaggaggcagaggttgcagtgagccgagactgcaccactgcacttcagcctgggtgacagagtgagactctgcctcaaaaaagaaaaaaaatttctaggaaaatgtttaaagacatcatgccaaatattttatcatcatctgaatacaaaatatatcatttagcctttataaccataatttttaagaacaaatcttcgcatttttccagtgtgacctgttttgtactcctacaaactttatttcagctaacaatgcttatcctataattccctggtaaattatactttcatatcaaggctctctaaatgcaattattcttccccctcagaaagtggatctcttcagcctgggaattatcttctttgagatgtcctatcaccccatggtcacggcttcagaaaggatctttgttctcaaccaactcagagatgtatgtatcaggtgttttagtgcctacattttcagtaaccggaatcttagcacagagatcagaattcaaagcaggatatttttctggtatttataatatagaagaggctgccctactgtaattttaatgactcatttattcagatatgcaagactaaccagttttcccatttttagtgaaacatttttctgagcaaaggaagtcacctcagttaaattcttaaaatagcagttttgggagccaaagatcatcagcatgtaggagggatcttactggtctctccactatgtttccacagtgaggtaaatggaaccctacctctgatgatgggaaacttgccccagttttgtttgtttttggaaatcttacctggagaaattgctaggttatagttgctttttaaaaaattattctgagatttactcttgattttaaagcaaaggaagaagccacaaaattgggcttgatatgaatatggttataacaagggagtagattgtaaagaaatgggtatttagttctagaagttaaagatgcctgttgaatgggccagttgtagtaacgtctaaagaaaactaccaagaccagaagttaaaacgggtccgaaaaaaatatctgccccttgaaatgtttttcccaatgaaatttccatttgtgttcttgggattaatccttgcctcatttactgcctgagctaaaaagggaccagtgttacatgtgcgaggtcagagatgcccatgagcaaaccgcattaagatgaaagtgaagagtgaggtttgggtgagagtgatttaaattcacatatttatgagcgagacatctggagagccaccttctttcttactgagcagagtgaagcaggaatatttattaagttaattcataaacacgataactagaatgcagtaagaatactcctgtattccactataagaacacttctctggataattttgaaaacaaattattttactgtgagtacagtgtggacagctgtgttcgtaaagtataggactaagtgaagtgatttctattgcctcgccttgactgcaatgctcttagatgattatgtccttaatgaagtgcctttctttagtctaaaattcatgtttatttaccagaaaggtgagaacttttggggaagtagagattttttttctcttactctatctgtgttggtatatgggtgtggttttttttttttgttttgtttttttttgccttttttcatctgcatgtttaattaaactactttgttgttctctgaagccattaggtttttactttgtacccagatgtgctttctgccccttgaaatttttttctcagtgaaatttccatttatgtttttggggttagtccttgcctctgttactgcctgagctaaaagggaccaatgttatagtatgtgaggtcaaaggtgcagacagcattaggacgaaagtgaagagtgaggtttgggtgaggctgtcatttgggtaaagtttatattaaaataatatgtatgtaattggaagaataagcgtcaggtttcaagaaggtatcacctatcttttcttgctagcaaatttttatttctgtatttgattttcttacttatggtgaataaatgctttcactgtggcagtctgccaaaaccttgctgatttgaatatatttttttagcccacttcgcctaagtttccagaagactttgacgatggagagcatgcaaagcaggtaattttctgatgcgtcaattactatgtcttcagtcttgcattttaattattatttttcttctttttcaattagtaatcttctgccactcattctcttgtgtcctgggaacaacgtggggaaaaaatatgaaaagatgaagcacttaaaatgtcattagacttgaactacaccataaaaatgccaagggctggcacagaaaattaacaaactgcagggttcttttgtgcaattcgttgtgcttttgaagtgctatttggacccttggcttagctgttgaaaaaaaaaaagaatccttttacaactcattgtttttgataaagcttggggctttaagaaaaaaatataatttaaaactgtaattttgttctgttttgtggttgcagtagctcagattatgggggaagggttgcattttctggacagtctattgtcacagtattttaaagcaaaataaattctcctatataccataaatatctgagtatatgtgtgtgtgactcatgacataggctaatattggcatccagcaaatattaaaaaaaatattattggtgaatgtgtgtattgggcttctggtatgcctttcttctgagtgccagttgtttgtcttggtacagtggttaatactcttgtcatatggaagtttctcaaactgacttactgacaattataatcaaggcaaactccttatttaaatcattaatgttgagaacaaaagcatagatggaatattgtattaatttggtccttcttgcttgctggttatgtatctgaatggacatgccacttttctagactttaatttccctcacctataaaataaaaagattaagtactctttatttatattagcactaacattgtgtcatttggtaagtttaacatgatggttatttatggctgtagggacctattctgcctcatctgtttaattagtgaaggccattagaaatacattgagtcatgtttctgcttcttttggtagctattattgtttctgggtgtcataagtaaacattcatttcatagcctttccttatgacaaggtcagtcttatttggtgtttccccttgttgacagctaagatggcccaggaactatacaaaccatttttcaccatgaggactgcactcctaccatcagatatatattagatacccttgagcatttgagtctgggctgtacaaattggcaccaaaacaaaaacaacaaaaccacaaccacctcccatgtcatagtcattgctttttagctgaaaggaggaaacttagaagatgcttatagaatgagcatagcataattttttgccatgcacatttaccagtacagcagggtctattatgctcaatagggtattcttgtttttgtcagtttaatatacctttcataaaagttgtatcatgtcattttctttctatataatactcctatatcccatacaaactaattgcctgtgtttttattttaccctaatactggaaggagagtggtaggggggcatattttaaagatttataactagaaaatgcttaataaagtccatctaataattgaggttttcttatctcaaatatttctctaactccttataaatctttattataaacaagaggattaaacatcattaaggaacctctcaaaggtttagattgccttcatatggttcactgctttaatgaggtggctgtgaagatataacaaatcagtaacataaatcaagagaattcaagggaatggtatcaatgcaaataacataaatggagaagaaaccattaaaacaagatgttttacattgcttttaggattccagcagttattatgcattacaatttctactaaaattaggcatgtaaagctatttgttttatctttttacatctttttatacgatattttctgtgtttataaggcctaatttctgcttctatgtagttgttgatttgattttttttggttgtgacaataaggtataaaaacaaggggcctccttttaagaaatgttcatactacattgttgcacaactctgtggtcataataaagcagaaaaaataatgacctattcagaaatttcagaatgtcagttaagtgcaagaatagtggcaccttttctttgacctgaactgactactgacttgtccggagaatagctgagcattatccattgcatcccattagcagtgtgcctgggttttattgtagaaatcagtcatctcctggctgttgaaccacgatccagcaaaacggcccacagccacagaactgctcaagagtgagctgctgcccccaccccagatggaggagtcagagctgcatgaagtgctgcaccacacgctgaccaacgtggatgggaaggcctaccgcaccatgatggcccagatcttctcgcagcgcatctcccctgccatcgattacacctatgacagcgacatactgaaggtgggcttaagccacgctgcacaaagggagcttcaccttgtccacaaaaggatcaagccagtttctcacagattcttttaatgcctctaacataagttcttatgtgaggtattggaagcccctaaaagtacatgcaaaatgtgtgtatatgcattcagggaagaggacccatactttcagtcacctacttgaaggagtccttgacctttcctcctccctacccacccaagagattaagaagcagtgcctacaaaaattagccgtgcgtggtggcatgcacctgtaatcccagctacccgggaggctgaggcaggagaatcgcttgagcctgggaggcaggcggaggttgcagagagccgagatcgtgccactgcactccagcctgggagacagagcaagaccccaactcaaaaaaaaaaaaaaaaaagaaacagtgcatttagagactgatccctagcccaaacgcccagagccataagcatcaaccagctcatatctagatgaagtataaagtagttcccagtgctggttgcacatctacttcatctcagaaactctctgacaatgcagatgcccaggtcccgtagcccatctagtggctcagaatctccaggtgtgaggcatttcagaatctcattaaaagctcccaagcagtttctgaagtgtagccaggttgccagtttgggaagactttaacatttaatttcttttaaaaagaaaaaaaatctgaagcatattagtgaaatgttaaaatgtgttaaagttgggtgagtaggtaacaggtatttgttatattctctattatgtttctgtttgcttaatatatatgatataatttaaaaagatagagtagtggaggaagtcatagtaaaatttatgaaagatcagtatagattttagagaccaaacacaatttttactggctggcaatattattatagaaagatatttgcaggattataggtgacttttttatagatgtcttttttcatatgtgttgtttctaaattttctatagtgaaatggtactacttttataatacaaaaacaaatgaaaaagaaagctattggcaaaatatgtaaatgccatgtagctttcaacaggcctgccatgaatcaccttggtatgtgggaggggcctgatgctgttaggtggtcatcgcgccacagtatccctgagagtcagagagaatgtgtttatttgattatctccctctgaaaggcaaatatcaatgtggccaagaatttggactttgaacccaggcatccttcccattggttgaaaggttagctcttgctttccaaagcaggccatgaaagatatgtgtcctcttccctgatgtgttcaaagagggatggacttgtcaagacttgttttttgaacctggaaataagcagtgtagtgcctactgcaagccacagattaatattttaaaggatccctttgataaggcttcaatgatgatgttttaatcggtcctgttttagggcaacttctcaatccgtacagccaagatgcagcagcatgtgtgtgaaaccatcatccgcatctttaaaagacatggtatgtacgccctttttaaaaatgatatttcttctcataagacttttttcatcattagaaagtactgttagtgttcgggcatatcatattttactttcaaattcagttataaataattgacatcatatggaatttaagcttatttttgaaactgatttgaatattacagccttactattaatactaaaatgcaattggtttgtggagtcagaaatatgaccaaactgtcaaacttaactctagatgagctctctatttataaatttagagaactcaagaaaaattgatatgacttcaatggtcccagtagcaattacttaactgtcaggtttgtgttaattttaggttgccttctaaggagaatgtgaacctgatgatgagctattttttctcatttggtgtaggagctgttcagttgtgtactccactactgcttccccgaaacagacaaatatatgagcacaacgaagctgccctattcatggaccacagcgggatgctggtgatgcttccttttgacctgcgggtgaggctgggaacacactgctgacaatcagaatgctgtatctagtcacagggatggcatctctgttaaaggatttttcccccaggcttatattataaatgtcacctttgggaaatgtattcttgaggaagttgtcagagtgagagtgttactggggtggaggaaatgtttggtcctgaatgcctccaccttcctaatagctcaggtgtttatggctctaggaactggaggaaccctgcattgcaggtgccacatgtgcaccccccagtgttgagtgaccacagcaggttaaccccacccacttagacaaataaatgtagtttgtttgtctttttaacttcctggctagatcttcagtaaacatcctaacatgttaatgcctagaacagttaaattcttctaacagcaagtgtctctcctaattgggtatgctgagttttgcccgtgcctgctttcttccgacccccagggatcctgtcgacagcagcagtcttaactagtctttcactcacacagtgttggctactaacaagctatctgtggtgctgtatgatagagcaaggaaaacatgcaatgcatgtgacagacaaggtttaatacctctcacatacagaaagcactgacaagtggagacatgagcaaaggatataaccaggcagctctcagaagagaatatgtgcatggctgataaacttctgaaaagctgtactgcctcaccaataataaagaagtgcaaagctgtctcaacttcacccatcagacaggaaacatttttaaattaatgttatccagagatgacaggagtgtaggaaagtaggtattttcatatgttgctgatgggaatgtggactgctaaacctttagaaaagtaatctaaaagtttataataaaactttaaaaattttgttgcacattctttatccttagaaccagcaatcccactttgagcaatttactcaaagaaagaaaaacacatcagtgtatgaatgttaaaaggatgttaattgccatattattgtggtagtcaaaaactgtctgtctgtttatcagtaggaaaatggttgaataatttgtcaccaatattatggaatattaaggagctattgaaaagaacattgagctaggcacagtggctcatgcctgtaattccagaactaggctaggtaggaggagtgcttgagcccagtagttcaagaccagcctgggcaacataggaagaccccatctttacaaaaaatttaaaaattagcccagtgtggtggctcgtgcctgtggtctcagctacttgggaggttaaggcaggaggattggttgagcccaggaagtcaaggcttcagtgagccatgattctgccactgcactccagcctaggaaacagggcaagactctgtctcaaaaagaaaatttaaaaatttttttttgtagaaacgggctctcgctgtgttgcccaggctggtctcaaactgctggactcaagcagatccttctgcctcagcctcccaaaatactggaattacaggcatgagccgccatgcccagccaatctatatttttatatagatcaaatatgtattttttatatatgtataagatgaaaatacagtcagctcttcgtacatatccttggattccacatccacgtatccagccaactgtggatggaaaatactcagaaaaaaaaattccaacaagcaaaatttgaatttaccatgtgctaaacactgcattgaatccacacaaaagaagggatgtataggcatagtagtagatattataagtaatctaaagatgatttaaagtgtacaggaggatgcgcataggctataggcaaatgctctgtcattttatatcaggaacttaaccatccactgattttggtatccttgggggagtcccggaaccaatttctgagggacaactatacatatttagatatagccatatttatacttgatttgtaggaatgtgcatggcacattgttagctttttttaaaaagtaaatttcaaaggaactctattatcccatttttattatagagaaagaaaagtttttttaaaaaaattgtgtgtgtacaggaggctgaggcaggagaatcacttgaacccgggaggcggaggttgcagtgagctgagattgcaccactgcactccagcctggacaacagagcaagaccctgtctgaaaaacaacaacaacaaaacaaaaaaacaaaaaactgtacataaggtatactgtgtgtgtctgcatgtacttttttgttttatttttttttttgagatggagtctcactctgtctctcaggctggagggcagtggcgtgatttcagctcactgcaagctccgcctcccgggttcacgccattctcctgcctcaccctcccgagtagctgggactgtaggtgcccgctaccatgcccggctaattttttgtatttttagtagagacagtgtttcactgtattagcaaggatggtcttgatctcctgacctcgtgatccgcccacctgggcctcccagagtgctgggattacaggcgtgagccaccgcacccggcctgcatacacttgatatatgtgtagatatatatatttggccctctacatccttgggtggtttctgtatccatggatccaaccgaggatggaagatactcagaaaaaaaaaaaaaattcacaaagctccaaaaagcaaaacttgaacttgtcacattcacgtgtctgaatgaccgtgcacatcaggttgtttgtatcaccaaagagtaaggtgtcaaagaatacactcattttgaccatactttttggaggggggagtggaatctttttttaaatgtatgtcatatggcttattgtgaaacaggttttgtgtttatagtctaagaagaaattccttccacattcctcacttctgtttttcttttatagtgagtaaagtgatgtgggattattctgaggtagaggtaaataaacagcaaatcagatgagacatttgcgttttgttgaaaaaaaaagaatagaagtacaaatatttacatagctatacttaaagctggcttcttattctctaaatattaggagactaaagtgcagatttttaaatatcagctcccattctataagctgatattgaaatgcaaaaaattaaaaagtgaatgtatgttgagaatttggcccatcagtggtaatgataccatgttggatctgttggggcaatctaacaatggttttactagttgtggttactatttgaaggtgtttattaagaatttattctaagagattgataggaaaatcaggaaattcaccataagagataatacccattttgactgcattactataaaagtgacattttttttaaattcataaataaataacttgcactaattttagttggacataataaaagctccacagagaatatttaactaaaagtgaattttaaaaaaaacctaagaaatgccacagtgaataaggttgatggtatgtctagcagcggagtccaccactgaccaaaacactgaagaacatttcagggagtgtgagtggtgagcagtgcataacttagtgaatacactaaaagccactgaagtacatactttaaaggggtgaactttatgggacaggagttatgtttcaataaagccgctattaacaaaaggcacattttgacattgacctttcatattttgtttatttttcagatcccttttgcaagatatgtggcaagaaataatatattgaatttaaaacggtaagaaacaataggagattccatttggtagacataggaaaatagttgaataatttgtcaaccaggaaagaatattttatttcctgtgatccttacacagttaagaattctgggttcagaatattgagcttagaatatgaaccagaagcccagccacagtaccccttcctgtaaggtaactaggactgttagaaggaatgtagcaggtaggtaccgtcatgttcccacagtctattctgtaccttctaaatgtccccaagcaacattactaattattttcacaaacggttgcttgataaaaacatctggctgttcatgatcacagatggccccttttaaaacttaattggtgggacaaatggccagtggtctctatgtgaaaactgcctacacaggtaaccgaacaaaagctgcttgtagagaagtggagtaaacccagcaggaacgctgagcgctgaggacctccaggcacttagccctggaaaaaggctttctgtacattcaaataccacaggggtccaacactgagatcttcataatttggagcagtattgttgtcaatgaggcaccctactttaaagctcctttcttcaactgaaagcaaagctctttacatgcttttattctagctacaagtgaataattaataatcgtagtcctatggtgtgggtatccctgtgtagaaagcaatcactaaggtaaaattttttggtgtaatttcatctctatttcagacatttaaaaaaccttaagccccatagcttaatagtggcaaaactgggaattggaacctagatcacaaggcaaggctgttccaggtcaaatttgtctttcagtcctcttgatcataccaccgattaattttttttcatatttgtttcttatatcttgttcaacaatttcttatacatatttctttctagtaagcaatgaccttagaaatctgggtttctctctccagatactgcatagaacgtgtgttcaggccgcgcaagttagatcgatttcatcccaaagaacttctggagtgtgcatttgatattgtcacttctaccaccaacagctttctgcccactgctgaaattatctacactatctatgaaatcatccaagagtttccagcacttcaggttcctttccatattttaacattccaagattccccactatatttcttcaccaagtgtggtggggaaaaccacagctacagacctgcttctcagtctgtcctgcagatgaatcacatctttactaaagtaactgagaagagcttgctggtgttgcttttgaggttcagctcaggctcttaccttcacaggaactggttttgttttgggggatgggtattctctgcccattcttctaaaatgcaagatatcaggctaagattcctaagatgctcttagcctgttcataccctgtttggaaccctcagtggctctatcctacacccgatctcttcactccccaacttcccttttcaccaagtctgcatgctgcctagctggtggggactgctgccagcacttctcaggcttccctccccaccccacacacacaccctgtcattcctgccaccgtcagtcaaatgttcccttgtctagaaagtctttgcccagccatggtttgggccctttctccccaggaagcctcactgcaccctcattaattagttggccaccttttcttctcaactctcacaggtcttgatctgagacacccatgtactaccttgagttatgttcattgttttctccaagcagaacatgtgtttttagggcagagcctacgagtccgctttgccatatacccccattgcagccagctcggcacatggctcaccactcggtgaatactcattaatcgatttgtgtggacaaaagttaacaataactattccactggcctgtgcttatgagtcgattactactggaccagatccttctgtctttgaaatcaactctctcgggctttttaacatagctgaagaccagtcagagttgtttttgttttgttttgttttgttttgttttgttttgttttggagacagtgtctcgctctgtctcccaggatggtgtgcagtgatactatcacagctcactagcccctaccttccaggctcaagcagtcctcctgccttgctgcttgaatagctgggtctacaagcatgtgccactgaccccagctaattttttatttttttgtagagatggggtttccctatgttccccaggctggtcttgaactcttgagctcaagggatcctccaaccttggcctcccaaaatgcttgaattacacaggcatgagccaccaccccagccagtctgagtactttggatatatataatatagtattaaattagagtatactctgactataacagtgcaaaaagaatgtatgaaaaaaaaataaactaggaagccatatgctaaattcaatccttccattgtgttaggatgacaaattggtggtaagtttccagatttggtcatgtaccagtaattgcttttataatgaaaatagtaatttttctccatatcccaggaaagaaattacagtatttatttgaaccataccatgttattgaaagcaatactcttacactgtgggatcccagaagataaactcagtcaagtctacattattctgtatgatgctgtggtaagcatttaattacttatgatgttgaaagataataccttgatgttgaaagataataataatagttcctgatgattttcttacccatgcagccatgaaactgaattgggagccttatctccttccttcattgctctaaattgaaagaaccaattgattttaattatatcaacagttaacaagtattggttgagcttttgttccatcctcagccctgtactactaataacctccggggtgttttttaaaaggctaacttctaattttaaaagatcaaattatttaatttgtcagatagtaaagttattcaccaacctacttattaaggcaaatcactaagtaattggtcctgatacttgccaataataatttcaaagatagttaacattgactgagccccgctctgtgagctaggcattgttctgagctcctctgatggatgaactcacttcattctcacaccagtgctgctattacctttcctttagagaccgagagcaactgttcatgttgagaataaacagtgtgccttgcccttgattcttccagtctgcctgtgcttatcagtaaagtcatgtatagatttgcattgattgaattaaggcagaatggcttcgaactctggtggggcctcatttaccacctccttcctgtgggactgaggctatggcacctccagttactcttccctaatttagtcacatcatagtattcattactttatagtatatgtgcgggtacagagactggaaggggacgcattgaaaaaatgaattagtgttatattatgatgctaagatggaagtgaatgcttatgttttctaatatcttttcatgttaagttttgttttcataatgaataagaggcatccaggagatgtaagaactaacagcaccagaagtctatggttaagacagagtagtggaagtcctcacataatggcttattgtttttatacaccaaaaggattaactagcttttctttcatctggcaggtacacatcaatggcccaaactttactgcttgtttcttagtggttctttactccccctaaagctctgctgctgtttgtcagtgacagatacaatatgatgtcaatcggacactggcagaaaccccagggattgtgcaaggggcttcagctcttactgattcatgtcctgcggctacggcacatctgccagcgtgggatgaaatgcccagagcctggcctttgttaggggagcccagagcaaaatgactccctccctgcccaaacaaatgccctcattaagcctgtccagatttgggtcacctcaccattcagcaagtacaactttccccttttaattcttttgtcagggtttttcagattttaaaataagttaattacggttttgtgtgaattgggagaaaaaattttttaatcacagaattcaatctatcctgtaccattaggagcagtttgttcaaaatgaaggctatacttgttagaattcgcctggaaattgtgtcttgttcagtgccagatttcgcgactctcattgttacctttttcttccacgttagacagagaagctgacgaggagagaagtggaagctaaattttgtaatctgtctttgtcttctaatagtgtaagtaccttctaatggtattattacagctttctctgtaattttgtgataccagaaaatgtcatcaaattctcgttgcagtagggtagcagccagcgcttcctaccacctcgcagatgcagtttttcccttgagtgttaggtaccatggcaacctctgggattaggagaagggagaaactaatgctgtgatcaaagaatgtctctccatgcttcttcttgatacgctgtaatcatcctgctctttcttgatcagcagatacttttctttgtcaccccttatagagctgtgcctggtagagcctcctgctgaacatacctaataccagttgtcctcttttgaattagattatacaggactagaaggaggcacagaattctgcaaattcatctggggagctacccttcccctacctccatgtcttctaactcctcagagttgaattaaagctctagcttttctggtatatctcttaatcttaaaatcttacatttgatcccatcatcaataagggaaatcttatggaataaacagtttggtcatattctctctgtaggcatcagattgatcccagatctttggtacagtaacccacacttaattgagtagctgaacaacagaatacaacagggattttgtacattttcctgaatatttaaataaggaaagtttttttttaatttcccggaacctgtctaggcccttgtctgacactcaattatatgatcttgcattgatcagcaaaattcacatatgggatagattaaaatatgattgtacacagggcaggaagagtcactcaatctttcggacacctacagtgtggcaggcacaatggcagggatataaagaagagtccatagactgcattcagcttcttggttcatattggcctttaaaaagccataaggggatatgcacagcatgtatctgccctcaactctgtaaaacagctttcagagggcacacggaaaccagagttcaaagaaatcacccctttgcgggtagggaaagtaaaccagatgcatagcactaggagttctgaaaattgagccaggttaaatcttaaatatttaatattgggggagatagtaatgatatgcaaagtaacacaacagctaaatatccaaatatgaaggacaatatacagtatttacatataatctaaacatgtacacagcacacacctatgtgcagaaatagtcccatgtgtaaatagcacagagaatctgcacaagactgctcagttcaatgattctatacccaagtttccaacccaaaaggttatttggactaaagtcacatttcagaacatctttttttttttttaagaaagtcttataaatatacattcggacgtaatagccacattggttgttcacatgtcaacttcttttctttctgttaaatctctaaccactggttattcgatgatgctaagtgttaattagacgtgtctgattcagttaaaaacagaaaaatagtatctaataaaggcatttggtactttgattattttaaaatggactctaagggtattaggaaggggagtagaaatattgccaaagagtttcacatatctgacccagtcctcttatttcacaaatgagacacctgaggcccaaagagatgttgtgatttgtcctgagtcacatggagttagttgatgatagggtgaggaccaaaatctggagatattgacttcagtgcttctggtagtttattattggggtaatttaatgttcaaatttatagagaagaaatcatttttattttcttaaaaaaatattttaaatcgaatacatgattttaaatttaaatttttttctttttatttttttgagacagggtcttgcactgtcacgcaggctagattacagtggcacaatcatagttcactgtaacctcaagctcttgggctcaagagatctttctgcctcagcctcccacttaatttttttttcttttttatagcgggatagcaggcgtgagccattgcatccagccaaaatttttatctttaatccctctattagtctgctgtcacactgctaataaagatatatccgagagtgggtaatttataaaggaaagaggtttaatggattcacagttccacatggctggggaggcctcacaatcatggcagaaggcacggaggagcaagtcacgtcttatatggatggcagaaggcaaggaggagcaagtcacatcttatatggatggcagaaggcaaagagagagaacttgtgcagaggaactcctctttataaaaccatcagatctcgtgagacttattcattatcacaagaccagcatgggaaggacccgcccccacgattcaattacctcccactgggtccctcccatgacacaggggaattgtgggagctacagttcaagatgaaatttgcatggggacacagctaaaccatatcattctacccatggcccctcccaaatttcatgtcctcacatctcaaaaccaatcatgccttcctgacagtcccccacagtcttaactcatttcagcattaactcaaaagtccacagtccaaagtctcatctgaaacaaggcaagtcccttccgcctatgagcctgtaaaatcaaaaacaagtgagttacttcctggatacaatgagagtacaggcattggataaatacacccattccaaatgggagaaattggccaaaacaaaggggctaaaggccccatgcaagtctagaatccagcagggcagtcaaatctgaaagctccaaaatgatctcctttgactccatgtctcacacccaggtgatgctgatgccaggggtaggctcccatggccttgggcagctccccacctgtggctttgcagggtacagcctccctcctggatgcttccatggactagcatttagtagggactctgtatgggggctgcaaacccacatttcccttctgcactgccctagcagaggttctccataagagccccacccctgcagcaaacttctgcctgggcatccaggcgtttccatacatcctctgtaatctaggcggaggttcccaaacctcaattcttgttttccgtgcatctgcaggctcaacagcacatggaagctgccaaagcttggggcttgaaccctctgaagcaacagcctgagctgtacataccttggccccctttagccatgggtggagcagcttagacacagggcaccaagtccctaagctacatagaggaggggggccctggggccagcccacgaaaccattttttcctcctaggcctccaggcctgtgatgggagggcctgccatgaagacctctgacatgccctggagacattttccccattgttttggtgattaacacttggctccttgttacttatgcaaatttctgccgctggcttgaatttttcctcagagaatggggttttctttcctgtctcattgtcaggctgcaaattttctgaatttttatgctctgttttccttttaaaactgaatggtcttaacagcacccaagtcacctcttgatgctttgttgcttagaaatttattctgccaggtacccaaaatcatctccctcaagttcaaagtttcacaaatctctagggcaggggcaaaattctgccagtctctttgctaaaacatagcaagaatcacctttacttcagttcccaacaagttcctcatctccatctgagaccacctcagcctggatttcattgaccacatcattatcagcattttggtcaaagccattcaacaagtctctaggaagttccaaactttcccccattttcctgtcttcttctgagccctccaaactgttccaacctctgcctgttacccagttccaaagtcacttccacatttttgggtatctttacagcccaactctaccggtaccaatttactgtattagtttgttctcgtgctgctaataaagacatacacgaaactgcgtaatttataaaggaaagaggtttaatgaactcacagttctctgtggctgaggaggcctcacaatcatggtggaaagcaaagaggaacaagtcatgtcttacatggttggcagcaggcaaagagagagaacttgtgcagggaaactcctctttataaaaccatcagatcttgtgagacttattcactatcatgagactatcatgggaaggacccgcccacatgattcagttacctcccactggatccctcccatgacacatgggaattgtaggagctacaattcaagatgagatttgagtagggacacagccaaaccatatcaagattataggaggttttaacattttttgggttttttaaaaatttaagtgatttatgattaactctaagattaagctatgtcaatctgagccttcatttagcccttaggtttcatgtgccaatttatggatgaactaggttgtacttgcctacagtcttaaaatggctataattttgtttcttaataatttctactttagctcctgggagttttctttctggctttatgactatggttgtttcctcttactccagctgagtaccagggactgtgagatcaatcatctctagccactgacctcttctggggcagtctatgagtacagctggtgacagccaggatctggcatccaggtgggaggagagggaagggaggatcaggaggctgcccacaggagaagacatctcaaggttgcaaataggaatgattcaagccaaggaagggaatttctagctaattctgtattaaaacaagtcagactttgccttattgtccccccatgtctatgcctgcagtaacaggaattcatgagaataagaaaggtaaagaggaaaaatactggcctgaaaatagataatggaagctctgctagtgccagggtctgctttgctggggtcagcattaagtgtgagtaaatgtatctgaataaaagtgaaccatgagtatgtgtctaaagcattcctgcaaggtgctttcaagttgttggaaaaggataatccttagtcaggattgtggcaaagcctaaaataatctttgaccacaaagataatcgtagcatcccatgtgctcctgctcctgcaggtgcacacagtcggtgcaaagggagtcttcccctgctgtggatgggcagctgactgtgcccctttgctttccagctgtgtcgactctacaagtttattgaacagaagggagatttgcaagatcttatgccaacaataaattcattaataaaacagaaaacaggtattgcacagttggtgaagtatggcttaaaagacctagaggaggttgttggactgttgaagaaactcggcatcaagttacaggtttggcaacagtttgatactggcagtacaaatgtgtagcattactaatagcacagggaggaaatgtgtttcatttcactaatgctagttagtgttttatttttccagaaaaactgctttctgtgttttggagcatttgatatttagtaataattttggcttaaatcaggatttctttgcaagtgccactgttcctatcatgaagcagttcttactatgttagcctcagagaggtggttattcttaaagagaagagaatttattttacttgtcaggctatggttaaacagactttgagctagatcttactgaatattttgtttatgctaaatagattgttctgatgctattgatgggaaacaccattttcagcattatattccacattctaaatttcaaacccttgacacatttgtgtggcatctctctttataggtcttgatcaatttgggcttggtttacaaggtgcagcagcacaatggaatcatcttccagtttgtggctttcatcaaacgaaggcaaagggctgtacctgaaatcctcgcagctggaggcagatatgacctgctggtgagggcttgccctttatttatttgctctgacttaattttatttcttctaaacttgttattttgaaattttcaaactaacaccaaaaatttgaaccagtaatatcattggatacttctattaatatatgtttcatctaggaatagaaatataatgtgaaccacatttgtagttgtttaagcttaaaacaattatattattttgcaagatagttgcaaagatagtactgagagggctcatgtaccctttactctgtttctatatatatatatatatatatatatatatatatatatatatatatatatatatgtattttggagacagggccttgctctgtcacccaggctggagtgcaatggcgcaatcttggctcacagcagcctcgacctccctgggctcaaatgattctctcaccttagcctcccgagtagctgagactacaggcatgcaccaccacacccagctaattttttgtattttcagtagagacagggttttgccatgttgcccaggctggtctcaaactcctgagctcaagcaatccacccacctcagcctctcagagtgctgggattataggtgtgagccaccacaccaccccttgcataagtacagtaaaatatcaaaaccagaaaattgacatttgtataatgtatgtgcatcattcttctccattttatcacgtgtactttccctcaacaaccaccataatcaaggtacagaactattccatcaccacagagatttatgggtatcaacatcttatcaattcaaatgaaatgtagaaactttatctccctgtatgtctctttacctcatgccccatttataatataattgtcttaaatatttcttctaatacattgagatccacatcaaacagtgttaaattttttactttactgttaaatataattataaaactcaaggggagaagaaggtctattgtatttaccccaaatttctggtttgtgatgagaaatttgctgttatttgagttacttttcccctataggaaagttatttctgacttgatgctttaaagattattttctttgtctttagtttcaaattaaatcatgatgtgtcttggcatgagtttctttggatttatcctgtttagggtttgcttagcttcttaaatctataggtttatgtcttttgcgaatttggaggattttttcaggcattctttgattttttttttcagtctcacactcttttttctctccttctatgaccccagtgacacaaatgtccttgaggttatgggacatttttgtccaggctgatctcacactcctggctgcaagcaatcctcctgccttggcctttcaaagcactgggattgcgggtgtgagccaccacacctgacctgtaattttaaattatttagtaacattaagtaaaaggagacaagtggtattaattttataatatatcttatttaacttagtatatccaaaatattatttcaacatgtactcaaacttctaaaaattattaacaaggattttacatttttttcaaagtctttgcagccagtatgtgttttacatgtacagcatgtgtcaatttggattagccatatttcaaatactcagtagtcacttgtgactagtggctgccatattgaacagtgcagagttagatgaaacatttgttaatattttttctaaatttgcatgtgtgcttgcttctctattttactacacacacacatttctttttgttgaactctttgatgatgagctgctgacagagtgctcactctttaatcattgttttccccgtaatcacagtttctttcctatttcataaccataactgtttgtgtctctccacagattccccagtttagagggccacaagctctggggccagttcccactgccattggggtcagcatagctatagacaagatatctgctgctgtcctcaacatggaggaatctgtaagttctggcttggcttcccagcatacttcgaggtgtctttcatttctaaaagtatgatttgccttttgcagtcatttacatggggcttctgatgtgaaagctatagacgtagggttttgaaacttacctttaatatgatagacaagcctaagacttgatgtcaatccctgcatttcagtccttatcatctgttctctagctggacgaccttagaccaggggtccctaacccccaggcagtggactggtacccatccagggcctgttacgaaccgggccgcacagcaggaggtgagcagtgggcaagcaagcattaccacctgagctccacctcctgtcagatcagcggtggcattagattctataggagcatgaaccttgttgtggactgcacatggaagggatctagactgcacgctccttaggagaatctaactaatgcctgatgatccgagatggaatagtttcattccaaaagcatcccctcccaacccccgcaccatccatgaaaaattttcttccatgaaaccagtccctggtgccaaaaaggttgaagacttctgccttagacaattaattcatccttccctagactcattttccttatctgtaacgtaccatataaatgtgagatgttatagttgttaacaggctcttaacaaaacttcttgttcaggccaggcatggtggctcatgcctataatcccagcactttggaaggtcgaggcaggcagatcgttgagcccaggagttcaagactagcctgggcaacatagcaaaaccccatctctaccaaaaaaatacaaaaattagctgggtgtggttaattagccatgcacctgtagttccagctactcaggaggctgaggtgggagaatcgtttgaacccaggagggggaggttgcagtgaggtgaaatcatgccacttccactccagcttgggcaacagagccagaccctgtcaaaaaaaaaaaaagaaaaaagaaaagaaaagaaatcctgctgtggtctacaaagctagaaatagctttttttcccccttgtatttcaggcaagattagttttcctagagaaaaatggtattttccagatggctcagggtagttgaaataatttctgtcttgaaagactaacataacattttttttttttttactgtggccgagcatggtggctcatgcctgtaattccagctatatcccaataaggccaaggcaggtggatcacttgaggccagaagttcgagaccagcctggccaacaagcagaacaacatccctactaaaaagaccaaatatatatatgtatatatatttatttatttatttatttatttattttagccgggcatggtggtgcacgcctgtaatccagctactctggaggctgaggcaggagaatggcttaaacacaggaggcggaggttacagtgagcggagatcgtgccactgtactccagcctgggtgacagagtgagactctgtctcagaaaaaaaaagaaaaagttgtttgagtgtgtcttttttttttttttttacaatgtgttttgaagcaaagtctttggcacgctgtgtttctatgcaggatttcaagaatgcccatcttcccaagagtgctgcctcccctcctgatgctggtttcacttccatgcctgcagtcttgctcctctaactgtaaccggtctgtttctgatccaggttacaataagctcttgtgacctcctggttgtaagtgttggccagatgtctatgtccagggccatcaacctaacccagaaactctggacagcaggcatcacagcagaaatcatgtacgactggtcacaggtaatgggacaaaaagcacctgtgagtgaagtgcaaattgctatggctttcatggcaaatatcctctgcacctatagactgtcaaactctgtttatctctgtaattcgagttgcctcctgtgttagtttctgattgctgcagtaaccaattaccacaaacttactggcttaaacacatatttattatcttacatttctggaagtcagaaatccaaaagcactttcactgggttaaattcaacagggctggctcctctgggaagctctaggggagaatctgtgtccttcccttttctggctcctagaggcctcctgcattccttggctcatggcctcttcctccatcatcacactcagcaatgaagcgcctccttccttgctgacctgtgcttctgttcttacatctgtctctaactcttgtctgtccagctccctcatacatgcaccctgtgattacgtggggcccacccagataatcctggttgatcactcacaggttctaggaatgaggatatggacatctttgcggggctgtactccagcctgccacacttctgaaggcactcagtgcttagtgtgttttgggctctgtatcctgagacctcccacagcatgcaggcctgacacttgccgtgggtgtggaggtgtggaaagtggcacccaggacacatgcctgccctttggaatgggggcgtaagcagaccatagaaggggtgcactcccaggagatcatccaggttgtacccacattcgcccacactaaaggtgccccagagcatggcgatgaccagggacacagacccaccaccctcccacctgctctgtttacatcacctgccaggaggcttctgaagctgctgctgtttactcgtgtgtgtgtgttgtatcaaaattcacatcagaagtgtgctgagcaacaatttttaatcatttgacagaacagtgtcctcttctacttgttcacatgtttcataaatcattagagaagtgttctgtcctgcagtaaaatccaagcctcgtggccagtgacctcagtcctgcacagtgacaccccacaggcttctctgccccctcctggtttgcttcttcagttctgcttttcaccttcccttatttcctttgtttccttcattttcctcagaggctttttcagcgtgtgtgtgtgtgtgtgtgtgtgtgtgtgtgtgtatgttgtgttgtataattttgggcatcttttattaagtcttgaagcttttgaaaacctcttactattgattgattattcatggccctttaaacaatcatgaagggaagggaggcaagagaggccttgttcctcccttgaattctatgcggcttcttgcttaatatttatatccccctgaagtcagcattttagtaattcacattgagaatataattggaaacagtattttcattctccttaattacttgaagctgttccaggtgctctgtgtttattttctttactatgtttgtttgtttcagtcccaagaggaattacaagagtactgcagacatcatgaaatcacctatgtggcccttgtctcggataaagaaggaagccatgtcaaggtaaagacgtcagagattttttacaattcaatagttaggtgttacctgtggagcacctgccttcacactgaggcccgggccgtgtaggtgactggaaatccgttccctctactctccctttccattgttgggtttcttttttttttttgagacggagtctcgctgtctcccaggctggagtgcaatgacgcaatctcggctcactgcaagctccgcctcccgggttctcgccattttcctgcctcagcctccccggtagctgggactgcaggtgcccgccaccacgctcggctaattttttgtatttttagtggagacggggtttcaccatgttggccaggatggtctcctgacctcgtgatctgcccgcctcggcctcccaaagtgctgggattacaggggtcagccaccgcgcccggccgttgttgggtttcttgctgaagaaaatgtgtataaaataaggaagagagtccaccttcattaaagctttaaaaagcaaaacaaacaaaaaaactggctgtggttttttcctacttttctcctcttgttctctttttccagctaagaaaataagaataagtaaagttgtatctgctgataggcatatcctctcattgctttgtaaccaattttacttttttgtattcaactaaaagtgttcataaatataccacctcataacctttatttctaattatttttaaagggaaaaaaactttcttaaaaatatttttctcttctaatttttttttggtttcgatatcagggtaatgttggcctgatgaaatgagttggagagtgttctctcctcttctgttttctgtaagatactgtatacaattagtattagaagtccaatctcaaatatttctatatatagagctattctggttacctctttcttctagaggcagctttggtagtttatatctttcccggaacttttccatttcgtctgagttttcagatattcccctgttattgtttcactgtctctaggatctgcagtgatgctccctccttcagacctgatatgggtaatttgtgtcctccctcttttttgtctaatcagcctggctagagattgatcagttttgtctttccaaggaccagcttttggtgtcattgatttttctcagtttttatttgttcatgtgttttctattttattcatctccactcttatccattactattttcttccttctgcttattttggatttagtttattctttttttagtttcttcaggtagaactttagatgaggtattgacaaactacaccttggaccaaattcagcccatagcctgcttttatatgtctgtgaactagaaatttttacattctttgttaaaaaacaacaacaaacaaaggagagtgtgtgactccaactatgtatggccctcaaagcttaaaacatttcctatctggccctttacagaaaaaaatttgaagctttgttattatacatgtttaggattttatatcttcttgatgaattgtcttcatcattataaaatattccttatccctggtaatatttcttgttctgaaatcttttggttagtgtttacgtcactacctttctccatccttttatttttaacctgtcttttttttttaagagatgggggtctcatcatgttgcccaggctggccttgaacgcctgggctcaagcaatcttctcacctcagcctccagctgggatacaggcgtgtgccactgcacctggctaacttatctatctttatatttaaagtgagtttcttatacacagtcactaggttgagttttcctttttttttttttttttttttttgagatggattcttgctctgtcacgcaggctggagtgcagtggtgcaatctccacttgctgcaacctccacctcccaagttctcctacctcagcctcctgagtagctgggtttataggcacacaccaccacacccagctaatttttgtatttttagtagagacagggtttcaccatgttggtcaggctggtctcgagctcctgacctcatgatccacccacctcggctccccaaagtgctgggattagaggcgtgagccactgcgcccagcctcctttttttttttttactctgagaatcctggcttttttttgtttttttttttgagacagggtctcactcacctatgttggagtgcagtggcgcgatctcagcttactggaacctgtctcccaggatcaagtgatcctcccacctcagcctcccgagtagctgggactacaggcacgcaccaccatgactggctaatttttgtatttttagtagagacgaggtctctactaaatgccaaatgccatgagatttgctaaatgccatgagagtcctacagataaagttctccaagggtccctcaggctgggagatttacataagaggcagcagtgaagtcttcaggaaggtgctgggatttatcctaccctcaagaattcgtggtcctggaagggccttttaggaagagggaactgcaaaggtgatggtagttcttttagtagttgtcccaaagatagaggcaggccagcagagaaccattctggtacaaccctgaatagtctattttgggtgagacagatggatcagaagcagaaaatggttatagctacatcatggagagcccaaatgccaaccaaggaatctggtttttttatttagcagttattggggaggccccgaatgttttgaacagaaggagacatcaaagttgtgtttgagaaaaattaatctgcagggatgtgtagcatggaatagagtgagggagaaaccgaggacagtgatagcagtataaagaatatcaaactagcctaggccaaggttgggtgctggccaggggagtgaagatgaagggacagatgccataaaagtgggatgacaggacttgggtttagaaaggagagggaggagtggtagatgaagctgagatctgagaaaccttggtggctgaccagatttaaaggggaagatgttaaagaatcacatgaaatgagagcccattcatcttggccttaaaaaaaaaaaattctatcatctgtgataaactagtccagaccagggtttctcaacagcagcgctgttcacattttgggccaaataattctctgttgtagggggctgtcctgtgcattaacagcatctctgaccgctacctactacatgccagttgcaccatccaaaaatgtcaccagacattgctaaatgtcccctggggagcaaaattgaccctggttaagaaccactgacccaaactattgatttagtagtcttactgtggtgctctgagctagtcttctgggttcagaaacctccaaatgatagatccgtttcattctttttaaggttaagtctttcgagaaggaaaggcagacagagaagcgtgtgctggagactgaacttgtggaccatgtactgcagaaactgaggactaaagtcactgatgaaaggaatggcaggtaacttaggaaacaaaagccgagaaaagtgacttcagttacctatatggaaactacgtaaatttattttaaaagtcaatttgagccaggtgctgtggctcacacctgtaatcccagcactttgggaggccaagtttggggaatcacttgaggccaggaatgcaagaccagcctgggcaacataccaagaccccatttctaaaaaaaaaatttttttgattagctgggcatggtggtgcattcctatggtcccagctactcaggagctgaggtgggaggattgcttgagcccaggaggtcaaggctgcagtgagccatgttcataccactgcactccagcctgggtgaagagaaagaccctgtctaagaaaaacaaaaagaaagaaatcaatttgatccttttgagaaacaaagataggtcaggattacttttaatgaaccattctgttgcttctgaataactcaatcaggagtttaattgtatgaccatcttgtatgagactaatcatagcttacattcaacatttgttcttcataccatttccaagaatactttatcattttgaaaagcctcaggagccaaaatctatctgtcattatcttattcagtctgctaatcagtgaatttcaataatattttgtccgtgtactttgaaagatgtaacgttctgggaaaagatctcacttcctcatgatgggagtatcaaccatatgggtaggaatttgacaaagtaaattaaaagccttaaaactaaacattttttttaaattgacccagcaattccactttcaggaatttataataaaaattattttaaagatgtctatcaaggctcatttataacagcagttctcaaactttttggtcttagaacccctttacacccttaaaaattatttcaggatcccaaagaacttttgtttatgtgagttatatctataaatattaaaacataaacattttaaatatgtttattcatttaaaaataacaataaccccattacatgctaacgtaacatatttctattgaaaaacaactgttttccaaaagaaaattaacttagtaaggaaaatggcattgtttaaaatatttgcacatcttttagtacactgttttacatttttgtaatctattttaacactttagtagaagaaatgattctcctgtctgtttatgtattcaatctgttgtgataccacaaatcatatagtctctggaaaactcggttgcacatttatgagaggatgagagtgaaaaggcaattaatattttaagattattatgaaaatagttttgaccttgcaagaccccttgaaaggatatgagggaccttcaagattctctagaccacacttggagaacctcatttcaaaatatacattggtagaagattgtttgaattatgataatttggtgaaatattgtgcagcctttaaaaatgatgattctactaaagctgagttcattgacatggaaagatgtccataaataggatgtttaatataatcccattttgtggccgggcgtggtggctcacgcctgtaatcccagcactttgggaggccgagaaggggggatcatgaggtcaggagatcgagatcatcctggctaacacggtgaaaccccgtctctactaaagatacaaaaaaattagcggggcatggtggcgggcacctgtagtcccagctactcgggaggctgaggcaggagaatggcgtgaacccgggaggtggagcttgcagtgagtggagatcgtggactgcactccagcctgggtgacagagcgagactctgtctcaaaaaaaaaaacaaaaagaacaacaacaacaacgaatatataatcccattttgttttaaacaaaatatacaacctatacataaaaaaatgtctagaagaacgtaccaaatttttaattgtagttttggttagtgggattacaagggatcttaaattactttgttaagcttttctatatatttgcaactcctttttttttttttgagatagagtctcacttttgccgaggctgaagtgcagtggtgtatacatgactcactatagccttaacctcccaggctcaggtgatccttccttcttggcctcctgagtagctgggaccgtagtcatgtaccaccttgtccagctaatttttttaaattatttgtagagacaggatctccctatgttgcccaggctggtctccaactcctggactcaagcaactctcccgcctcaagaaattcttatatgtatgctcattatcagaaaataccacacggtaatttttctggcttacatcagcaattctcaaccaacaatgattttgcttcccagggcacatctggcaatgtatggagacatttttggttgtcacaactggggagttttactggtatctaggagaggccagggatactgtgaaaacatcctaaagggtacaggactactaccccccaacagagaattttctggcctaaaatttcagtagtaccaagattgggaaatcctggcttacagaaaacaaaccttgctctgttcttctcatgcccccaccccttcttatttgcacctagccttaataaattcaccattaggtgtttctgagggaacataatgttctggaaatcaccagtattggaattatagatctaaatcaaagacagaggtttagaagagaaaccaagaaatagccaagtagtgagtatgggggaacattaccaagacacttaaaaggctacatgggatttagttttagcagggaaaggttcaaagtttttcctccagcaaatgattatttccctgttttcccaagatagagtgctgttgtctctctcaaaggctataaattaattcacagcatttgaaagaacatccattcacggctttttaaagaatatctttatttaccaaatgttctcctgtgggtggttgccaaggctactgccataatgaaggtggggctgctgttattcatgtttccttgtattatgaggggggcggaaagaacacccattatatttcattgaaatcagcttattgtgtggatccaggatttcacgcccagctgaataaatcagaatgttttccttaggcatttgttaacttaaaaagacatcctttataatttttacttgctcttgaccaaagcataactaaatgcaaattttttgtttttgtttttccaccaataaccaagaagatgtttttatatttaatggaaaagtggctcactatacatgtagttcactgtaagttatgtgttgcttgtgccttattgactgttctttaattgtttttgtttgcttgtttttagagaagcttccgataatcttgcagtgcaaaatctgaaggggtcattttctaatgcttcaggtataattactaattataatctgaacataatgatgcttatatgtttgctctaagcacttattactgtagctaactgcttgtgacactggaaatctatttttaaaataacatatacgcaataaattgtaccacatgggatgcatccctatgctttgaaatccacatcctagaaaaggataaaacaactggaatttagctgactcttctactctatctcttatttttacaagtgatttaatcttccttttactcaatttattgtacaagtgaaatgtgtataattttcctggagattttcctcatacagaggattgaaggaagtattttgaaatcccttgaagaaggacactatacacattttgttttcgtgaaagccaagagggcacagtggtgatagttatgcctttgctttcatcacctctagcaaccttacttcttttttaaagaagtgttccaattaaggccatgagaagacatatttggcttttaacagaattgagtctttcccattctcttctgttagcactaactttgtgttgccatcagatttccaattcttgcaggaatttaaagaagtatgcaggtttggtgatattcagcttgattttcttaggcccctgaggttttgatgactcctgttgcctccctgccccttccaccaccccccaacccctgcctgaggagagaagcatcaaaactgctgggtgttggggttctgggctcctcacctatccggtgcagatggttgtagggatagaaaacacagcccagtcgtgatctagcccttagaatcacgacaggatgtctactaataaactctgccatctctctgtagtatgttgtagaaagtgggaccagataaggccataaattctgaaactctcttggtctcaggtttgtttgaaatccatggagcaacagtggttcccattgtgagtgtgctagccccggagaagctgtcagccagcactaggaggcgctatgaaactcaggtacactgggtcagggtttctttggctttctaatatgagttacagaagagaaaaacaacaacaggaaaggaaaataagataaacatggaatttcttggaaatattttttccaagaaaaaaatttttcttccaacttgcctaactgggtggcttctggctccaggattcccatctgtccttcagagaggggccattgtgcactgtgggcacctcaaggcagctgttgtcagagtgactgcatctaaatgaaaactatctaatctggctctaaaggtagttgaggtttgtttgtgctctaaatagcaaagtagaagaggccgatgacaagacttaaggcaggcttctcattccatacatggtttcggcatttgctatatgcctactggtgtgctaagggctgtgtaaaatgtagaaaacattaacatggccccagtcctcaaaagagtttataacttagaagcatatgcattatatagagaataataaaagcaaataaatataggccaggtgcggtggcttatgcctgtaatcccagcactttgggaggccgaggagggcggatcacttgaggtcaggagttcgagaccaccctggccaacatggtgaaaccctgtctctactaaaaatacaaaaattagccaagcgtggtggcaaacgcctgtaatcccagccactcgggaggctgagacaggagaattgcttgaactggggaggcagagattgcagtgagccaagatcatggcactacactacagcctgggcaacagagcaagactttgtctcaaaataaaataactacagtagaacactgagttaaatttatagaatatgaatgttagagtatgctgtggacatatgcaaaagagtgagtgttaaaagagagcagtcaattttagaaatgtaatcagactgaaatacaaaaatcaggtactttatttttgtaagctcttctagctgtttctcaggatttgggtggaaacctatttttcccgtcttcctactgccttcatcacctaccaagtttcagttctcacaccatgtcctcattgctgccacctctccctttttcccaatttagcttcatactatcatctctctgtctctgtgtgcactgtttcactgcgctacgcctttataaggaatcatttcaaaattatgaagagataattgacaaggattattaaacaaatggtcaagataagttataaaaacctcatttcccctgagatcatattgctagacacccctttctgagtggattaagagcaaatcttcttttttttttttgagacagagtctcactctgtcacccaggctggagtgcagtggtgcaacatcagctcaccacaacctctgcctcccatgttcaagcgattctcctgcctcagcctcccgaatagctagtattataagcgccggccaccatgccctgctaatttttctattttcagtagagacggggtttcaccatgttggccaagctggtctcaaactcctgacctcaggtgatcccccagccttggcctcccaaagtgctgggattacgggcatgagccatcgtacccagccaagggcaaacctttagacaccatttggaatcctttctaggctttggtatgtaaccctgtgattgtatcctgggataggaaataagatggcaagaaagatggcttggtttaacatgttctgaattccattttcttactatttaggtacaaactcgacttcagacctcccttgccaacttacatcagaaaagcagtgaaattgaaattctggctgtaagtggctttctttagtattttgaaggtggcttctgtccatactgtcaaagtagttgcctcagggttcagagcttttttgctcagtgtcagcagaatttggatgcaggccttattgtgatgtgaactacacgcaatttaaaactattaagaactagggggagaatttaaggttttttgtttctcctctttgttcctctttaagatagaggaaaatgaaaacaaaagtcattttcctacatatatcaggcctttgccttgctaagcttacaccgaatacatgtagcagcgtcagacctttcgggtgtggtgtagagggacagggagtacagtttccactgcttattaattctccagggctaagatcttatcactgcacagttcattaagcccttttacagcacaatagcatctcagactctgcaaaccctattcatactgctgcatttcacgtgacactatggtcacaaggcagtattgtgctgctgagagttgatgtacatttgtgtgtattcacaggtggatctacccaaagaaacaatattacagtttttatcattagaggtaagcaatatgaactcttctgcactgtggcctttaagatcccaaatctttgctattagtttgccaaaatactgaagacggcattcattagtgatagtatttttctggcagctgcaggaatttagtaacatttttccttttatgtaacatatatgttcctaaatcctatgttgaaggactcatacttttctagtgactttatttttcagatacttattttattaaaaacaaaaaacaaaaacaaaaaaacacatatactgcttttactatgtgtcagggtctggcaggccttgttgtaagcattttacaagtagtaactcatttaatcattaccaccccaaaatgtagatactgttattatccctttacagagtacggaagtagagaggttaaatatcttacccacagtcacccagctagtaagtagtagaaccaggatttgaacctaagcagactagcagaatcggtgttcttaaccactatactatactatctctcaaacctccattccagctagggaagctcatttgcagattagtactatacaaaacaaaatccttttgtaaaaattaattaggtcctttataaatatatatatatttttacaggtacatccctttatcatcaaatagcctaaataagaactttaaaaatttgaatagttatctttgctattaagaacactcaactatagtcatagctacaggtgacttttgcaacatgtcatatcaaagaatacttttttgtctatccagagtgtttagtcacaaattaaattagattaatagtgaacttagccctagaactagtattttatatatcattttttgttctcttacaaataagcatataccactatctcactggcagtgtactgatttatgatccagtcaaatggatatacttaagagctgctatcaccgttgtacaaaaagtaaacagaggccgggtgcagtggctcacgcctgtaatcccagcactttgggaggccgacgtgggtggatcacctgaggtctggggtttgagaccagcctggccaacatggtgaaaccccatctctactaaaaatacaaaaaattagccgggcgtagtggcaggcgcctgtaatcccagctacttgggaggctgaggcagaagaattacttgaacccaggaggtggaggttgcagtgagccgagattgtgccactgcactccagcctgggcaacaagaccgaaactccatctcaaaaaaaaaaaaaaaaaaagtaaacggtaggcagaaataactgctctaaagtcacatcagcacactagggctgcagcattgttaatcaggctctaattagggagtcttgttttaaggaaaactggtgcttcagaggaaccccagcagtctcctaactggttctgctatctccctattactgattctcctggtatacttgaagagggaaatgacactggaatttcattagtgacccagaaaaaaccagctagtaaaccctagagacctgttgttaagtcttatctatttttttcctagtgggatgctgatgaacaggcatttaacacaactgtgaagcagctgctgtcacgcctgccaaagcaaagatacctcaaattagtctgtgatgaaatttataacatcaaagtagaaaaaaagtaagttatcacttgggcatagcagggttcacatggttaaaattcagggcggggggtttcagagtgacattattttgttgtcttgttgaggtttgacgcctggtaagctgttcttagaattgcagctgacaaccaataaatcttgcttggactgtgaatcacagtcatgatctcatcaataacaaaacacaggggtcctaggagtagctgtcccaattacaattttgttcacccaggtaattcactttctaagtatgtttaaatcaaagaaaataaccatgactactttgctgtatgtccttatgtcataatgccaatcaatcaatcaatcattcatgttatcatacacttaaaaggcaacaaggaagcctatgaggtgaatggttatctccttactaggaccttatactgcagacccctgtcagtcacaccttgtataaaacctatataattttttaatgactagccttccatcttgtttttgcttaaataaagctcctacaggtgttataaaaatttattagctctgttcttcactcattaaactgagtctgtccttatatcttttcttttcttttgcagggtgtctgtgctatttctgtacagctatagagatgactactacagaatcttattttaaccctaaagaactgtcgttaacctcattcaaacagacagaggcttatactggaataatggaatgttgtacattcatcataatttaaaattaaattctaagaagaggctgggtgcagtggctcacacctttaatcccagcactttgggaagccaaggcaggaagactgcttgaaaccaggagtttgagaccagcctgagcaacaaagcaagaccccatctctataaaaactaaaaaaattagttgggcatggtggcacatgcctgtagtcccagctactccagaggctgagatggatcatctgagcctcaggaggttgaggctgcagtgagctgtgactgcgccactgcactccagtctgggacaacagagcaagaccctgtcttaaaaaaaaaaagaaaaaaaaaatttttttctaagaagctgtcctacaaagttgagctttgttagtttttcatgtgtaatatattataaatttatcttttgggatataataaatgctttcatatacctgctgctttttaattgtaaatctattaacactaaaggttttagggagctggaacataaggtaaatagccttttcttcccttggctgtaatgactaagcacatgaaaatatccaaaccaaagggcataaagaaaccaaaaatcataattactttggaacctttattcttgatgactttgtagtatgtttctcctaaggtggttaaacaaactctcatttgactgtgagaactcatcgaaactggggaaccatgatgataaaattatacagccaggtgggaagcagctcatgagataacatgactttttataaaactgtcaggtttcaattctaataacctagaagatattatagagctaaagcctattcattaatcacatcattctagatttagtagttattgccagaactattaaaatgggttgggaaaggaataaagagacagtgctgataaacagacatgtttaatgatagcttgctcttcacagagatgtctacagagacttttaatctataatccaggagtatataaccatgcagcacagaccaattagccaaatgcaaaataaactagattcttaccacaactatcctataaacactgcaactattctttccaaaaggaccctaatcttatgtgaaaacacctactgtgggggaaccagaaacctagctatctggccaaaaggaaaaaatagcaattcagtggttaattggtgaaagcaggaaatgtatgccctttactgtgctgctgttgctgctgttgttgctgctgttgttggtgctgttgctgctgcggcaggtgctgctgctgctgctgctgctgctgctttggtcttcttagttttgttctttttgtctctcttcttcagcccatccatgttagctctaaggaggtttgaataagcctgaaagatacaacagagcataccttagtgggaagatgtgcaaactggcagaacaccagccctatctgcataatggatttagggtagccaaaaatcaggaaagaatatagcaccattggacacttgtaccggaaaatggtataagcataaaacactctttcacattatagcagcttctgcaacacccacagacagttgcacacattttttacgtttttttccaagggaaaattgcaggcaacttcttgttcaactatagtataggtagcatatatctacagcctaagacaaaatctaacttaaaaaaactagaaaggaagacggtattagcattgaaattcacaccctggcagcttttacttgaaacatactggtaaaacttatctccggagagcagtgaacccaagtatcaatcttacccagtgttcactatcatactgactcttgccctgagaagggaaacataaggaacacccaaaactcaccatctgaaacttattcacttccttggagctcacctgaaaaagaaggaaaaaagaggtcatacctattatccatataagcatcctcttctccaccccagatagtatctcaaaagcctccggaagacaatatccttatctttaaaatacttctccccaacttcagggttcataatacacgaatggttatttttctactctactttcctctgcctagagaacaagaaaaggagctctgcatctttttccacatgagaattgcaccaagaggtgaaaggcagtaggctccttttggggaaaaaaaaaaaaaaagctttgtttctcacctcttgaaatcccttagaaaggtggcattgggttttctccctgggttctgagaaaagtcagaggacttctcagtattaattttttatacattaatagaagatatatttaaactactccctccccatcttatttttaaacctgccttccattaattcaagcatatttaagcacaatgcgagctaccacaaaataaattctacctctgaagaacactccttaggtttttgttatttcatgatatctaacttaatctgtaaaaccacataagcttgttttactgtagaagt

SEQ ID NO: 112 - DNA, 1967 bp, Homo sapiens
tagagatcctggcgccgagcgacaggtgccggaacaaacaggcgatgagaaatcgcggacgcggaaccatttcttgggcaggacttccggcggaaaagcgggctgtctcggaaactcagagccgggttcctcccgggtttctgccgggtttctccctgcggctcctgggttgttgagactcttgtgaagatggcttgcgctgccgcgcggtccccggccgaccaggacaggtttatttgtatctatcctgcttatttaaataataagaagaccatcgcagagggaaggcgaatccccataagtaaggctgttgaaaatcctacagctacagagattcaagatgtatgttcagcagttggacttaacgtatttcttgagaaaaataaaatgtactctagagaatggaatcgtgatgtccaatacagaggcagagtccgggtccagctcaaacaggaagatgggagcctctgccttgtacagttcccatcacgttaagaatgtctgaggggtcaggcggtgctggcaagatggctgcacttgagaagatgacgtttcccaagaagatgacatttccagagaaaccaagccacaaaaagtacagggccgccctgaagaaggagaaacgaaagaaacgtcggcaggaacttgctcgactgagagactcaggactctcacaggaggaggaagaggacacttttattgaagaacaacaactagaagaagagaagctattggaaagagagagggaaagattacatgaggagtggttgctgagggagcagaaggcacaagaagaattcagaataaagaaggaaaaggaagaggcggctaaaaaatggctagaagaacaagagagaaagttaaaggaacaatggaaagaacagcagaggaaagagagagaagaggaggagcagaaacaacaggagaagaaagaaaaagaggaagctgtgcagaagatgctggatcaggctgaaaatgatttagaaaatagtaccacatggcaaaacccagaaccacccgtggatttcagagtaatggagaaggatcgagctaattgtcccttctacagtaaaacaggagcttgcagatttggagacagatgttcacgtaaacataatttcccaacatctagtcctacccttcttattaagagcatgtttacaacgtttggaatggagcagtgcaggagggatgactatgaccctgacgcaagcctggagtacagcgaggaagaaacctaccaacagttcctagatttctatgaggatgtgttgcccgagttcaagaacgtggggaaagtgattcagttcaaggtcagctgcaatttggaacctcacctgaggggcaatgtatatgttcagtaccagtcggaagaagaatgccaagcagccctttctctgtttaacggacgatggtatgcaggacgacagctgcaatgtgaattctgcccagtgacccggtggaaaatggcgatttgtggtttatttgaaatacaacaatgtccaagaggaaaacactgcaactttcttcatgtgttcagaaatcccaacaatgaattctgggaagctaatagagacatctacttgtcttcagatcagactggctcctcctttggcaagaactccgagaggagggagaagatgggccaccacgaccactactacagcaggcagcggggaaggagaaaccctagtccagaccacacctacaaaagaaatggggaatccgagagaaaaaagagtagtcatagggggaagaaatctcacaaacgcacatcaaagagtcgggagaggcacaattcaccaagcagaggaagaaataggcaccgcagctgggaccagggccgccggagccagagccgcaggagccaccgcagccggagccaaagttcctctaggtgccgaagtcgtgggaggaggaagtcgggtaatagagacagaactgttcagagtccccaatccaaataa

SEQ ID NO: 113 - DNA, 1475 bp, Homo sapiens
tttctaggaaggagccgagttattatctgcctctccgataggatgcctctttgtcttcacctgccattcccgctgtttcgtgaagaatcctctgtaaagggaaatttgttcaggcgactgctgtggccaccctctgcctcctccggcctctgcccctgggaggtccccgggggcctgggagtgtcattggcgtatgaccgcaacccttgccgctgccgctgacatcgctaccatggtctccggcagcagcggcctcgccgccgcccgtctcctgtcgcgcagcttcctcctgccgcagaatggaattcggcattgttcctacacagcttctcggcaacatctctatgttgataaaaatacaaagattatttgccagggtttcactggcaaacagggcacctttcacagccagcaggcattggaatatggcaccaaactcgttggaggaaccactccagggaaaggaggccagacacatctgggcttacctgtctttaatactgtgaaggaggccaaagaacagacaggagcaacggcttctgtcatttatgttcctccgccttttgctgctgctgccattaatgaagctattgaggcagaaattcccttggttgtgtgtatcactgaaggaattccccagcaggacatggtacgagtcaagcacaaactgctgcgccaggaaaagacaaggctaattgggcccaactgccctggagtcatcaatcctggagaatgtaaaattggcatcatgcctggccatattcacaaaaaaggaaggattggcattgtgtccagatctggcaccctgacttatgaagcagttcaccaaacaacgcaagttggattggggcagtctttgtgcgttggcattggaggtgatccttttaatggaacagattttattgactgcctcgaaatctttttgaacgattctgccacagaaggcatcatattgattggtgaaattggtggtaatgcagaagagaatgctgcagaatttttgaagcaacataattcaggtccaaattccaagcctgtagtgtccttcattgctggtttaactgctcctcctgggagaagaatgggtcatgccggggcaattattgctggaggaaaaggtggagctaaagagaagatctctgcccttcagagtgcaggagttgtggtcagtatgtctcctgcacagctgggaaccacgatctacaaggaatttgaaaagaggaagatgctatgaaagaaaaaaaaaattcctaaaactgtggaatggatcacgtagacatgtaacccagcagcagtttgcttctgttgtccactgattaatcagcctatgtgcctgacactggtcttgcagtacaactggaagccaaaacaaggtggaagatgtcctgaattaagatgttttcaccacattgtattacagagacagccaataaatctactatttgatttcaatatggaaaaaaaaaaaaaaaaaa

SEQ ID NO: 114 - DNA, 1319 bp, Homo sapiens
cgcgcccgtcccgtcgccgccgccgccgccgcagacccctcggtcttgctatgtcgagctcacccgtgaagcgtcagaggatggagtccgcgctggaccagctcaagcagttcaccaccgtggtggccgacacgggcgacttccacgccatcgacgagtacaagccccaggatgctaccaccaacccgtccctgatcctggccgcagcacagatgcccgcttaccaggagctggtggaggaggcgattgcctatggccggaagctgggcgggtcacaagaggaccagattaaaaatgctattgataaactttttgtgttgtttggagcagaaatactaaagaagattccgggccgagtatccacagaagtagacgcaaggctctcctttgataaagatgcgatggtggccagagccaggcggctcatcgagctctacaaggaagctgggatcagcaaggaccgaattcttataaagctgtcatcaacctgggaaggaattcaggctggaaaggagctcgaggagcagcacggcatccactgcaacatgacgttactcttctccttcgcccaggctgtggcctgtgccgaggcgggtgtgaccctcatctccccatttgttgggcgcatccttgattggcatgtggcaaacaccgacaagaaatcctatgagcccctggaagaccctggggtaaagagtgtcactaaaatctacaactactacaagaagtttagctacaaaaccattgtcatgggcgcctccttccgcaacacgggcgagatcaaagcactggccggctgtgacttcctcaccatctcacccaagctcctgggagagctgctgcaggacaacgccaagctggtgcctgtgctctcagccaaggcggcccaagccagtgacctggaaaaaatccacctggatgagaagtctttccgttggttgcacaacgaggaccagatggctgtggagaagctctctgacgggatccgcaagtttgccgctgatgcagtgaagctggagcggatgctgacagaacgaatgttcaatgcagagaatggaaagtagcgcatccctgaggctggactccagatctgcaccgccggccagctgggatctgactgcacgtggcttctgatgaatcttgcgttttttacaaattggagcagggacagatcatagatttctgattttatgtaaaattttgcctaatacattaaagcagtcacttttcctgtgctgtttcaaaaaaaaaaaaaaaaaaaaaaaaaaaaaaaaaaaaaaaaaaaaaaaaaaaaaaaaaaaaaaaaaaaaaaaaaaaaa

SEQ ID NO: 115 - DNA, 1686 bp, Homo sapiens
cagacgctccctcagcaaggacagcagaggaccagctaagagggagagaagcaactacagaccccccctgaaaacaaccctcagacgccacatcccctgacaagctgccaggcaggttctcttcctctcacatactgacccacggctccaccctctctcccctggaaaggacaccatgagcactgaaagcatgatccgggacgtggagctggccgaggaggcgctccccaagaagacaggggggccccagggctccaggcggtgcttgttcctcagcctcttctccttcctgatcgtggcaggcgccaccacgctcttctgcctgctgcactttggagtgatcggcccccagagggaagagttccccagggacctctctctaatcagccctctggcccaggcagtcagatcatcttctcgaaccccgagtgacaagcctgtagcccatgttgtagcaaaccctcaagctgaggggcagctccagtggctgaaccgccgggccaatgccctcctggccaatggcgtggagctgagagataaccagctggtggtgccatcagagggcctgtacctcatctactcccaggtcctcttcaagggccaaggctgcccctccacccatgtgctcctcacccacaccatcagccgcatcgccgtctcctaccagaccaaggtcaacctcctctctgccatcaagagcccctgccagagggagaccccagagggggctgaggccaagccctggtatgagcccatctatctgggaggggtcttccagctggagaagggtgaccgactcagcgctgagatcaatcggcccgactatctcgactttgccgagtctgggcaggtctactttgggatcattgccctgtgaggaggacgaacatccaaccttcccaaacgcctcccctgccccaatccctttattaccccctccttcagacaccctcaacctcttctggctcaaaaagagaattgggggcttagggtcggaacccaagcttagaactttaagcaacaagaccaccacttcgaaacctgggattcaggaatgtgtggcctgcacagtgaagtgctggcaaccactaagaattcaaactggggcctccagaactcactggggcctacagctttgatccctgacatctggaatctggagaccagggagcctttggttctggccagaatgctgcaggacttgagaagacctcacctagaaattgacacaagtggaccttaggccttcctctctccagatgtttccagacttccttgagacacggagcccagccctccccatggagccagctccctctatttatgtttgcacttgtgattatttattatttatttattatttatttatttacagatgaatgtatttatttgggagaccggggtatcctgggggacccaatgtaggagctgccttggctcagacatgttttccgtgaaaacggagctgaacaataggctgttcccatgtagccccctggcctctgtgccttcttttgattatgttttttaaaatatttatctgattaagttgtctaaacaatgctgatttggtgaccaactgtcactcattgctgagcctctgctccccaggggagttgtgtctgtaatcgccctactattcagtggcgagaaataaagtttgcttagaaaagaaaaaaaaaaaaa

SEQ ID NO: 116 - DNA, 771 bp, Homo sapiens
atctgagcatgtgttcgcgaccacgatgagtgtgccgcacttccggccagatcgccggatttccgctgagtgacccttacaagtccttcttgatcctgaactgggttaggtgccgctgttgctgctcgtgttgaatctagaaccgtagccagacatgggactggaggacgagcaaaagatgcttaccgaatccggagatcctgaggaggaggaagaggaagaggaggaattagtgataggactgaggctttcagtgcatactggcaaccttggaaggcaggaatgtgaaacttttccctactacttagcatcagaattgaatgggagaccgcattctgccatttctggcggcagtgtggctctgccagctggccttctgcacggatcccctaacaacagtgagagagcaatgcgagcagttggagaaatgtgtaaaggcccgggagcggctagagctctgtgatgagcgtgtatcctctcgatcacatacagaagaggattgcacggaggagctctttgacttcttgcatgcgagggaccattgcgtggcccacaaactctttaacaacttgaaataaatgtgtggacttaattcaccccagtcttcatcatctgggcatcagaatatttccttatggttttggatgtaccatttgtttcttatttgtgtaactgtaagttcacatgaacctcatgggtttggcttaggctggtagcttctatgtaattcgcaatgattccatctaaataaaagttctatgatctgcaaac

SEQ ID NO: 117 - DNA, 3636 bp, Homo sapiens
gtgcagaaggccgcgctagccggctcttcagcagcgagtgcagattgctcccccgcggccgcagatctcccgtttgcgccgcgttcagctgctcccgaacaacttttctgccggcccagaggccccagggcgtcgcagcgccgcgtgcggcccactcacgggccggatggactccaacactgctccgctgggcccctcctgcccacagcccccgccagcaccgcagccccaggcgcgttcccgactcaatgccacagcctcgttggagcaggagaggagcgaaaggccccgagcacccggaccccaggctggccctggccctggtgttagagacgcagcggcccccgctgaaccccaggcccagcataccaggagccgggaaagagcagacggcaccgggcctacaaagggagacatggaaatcccctttgaagaagtcctggagagggccaaggccggggaccccaaggcacagactgaggtggggaagcactacctgcagttggccggcgacacggatgaagaactcaacagctgcaccgctgtggactggctggtcctcgccgcgaagcagggccgtcgcgaggctgtgaagctgcttcgccggtgcttggcggacagaagaggcatcacgtccgagaacgaacgggaggtgaggcagctctcctccgagaccgacctggagagggccgtgcgcaaggcagccctggtcatgtactggaagctcaaccccaagaagaagaagcaggtggccgtggcggagctgctggagaatgtcggccaggtcaacgagcacgatggaggggcgcagccaggccccgtgcccaagtccctgcagaagcagaggcgcatgctggagcgcctggtcagcagcgagtccaagaactacatcgcgctggatgactttgtggagatcactaagaagtacgccaagggcgtcatccccagcagcctgttcctgcaggacgacgaagatgatgacgagctggcggggaagagccctgaggacctgccactgcgtctgaaggtggtcaagtaccccctgcacgccatcatggagatcaaggagtacctgattgacatggcctccagggcaggcatgcactggctgtccaccatcatccccacgcaccacatcaacgcgctcatcttcttcttcatcgtcagcaacctcaccatcgacttcttcgccttcttcatcccgctggtcatcttctacctgtccttcatctccatggtgatctgcaccctcaaggtgttccaggacagcaaggcctgggagaacttccgcaccctcaccgacctgctgctgcgcttcgagcccaacctggatgtggagcaggccgaggtcaacttcggctggaaccacctggagccctatgcccatttcctgctctctgtcttcttcgtcatcttctccttccccatcgccagcaaggactgcatcccctgctcggagctggctgtcatcaccggcttctttaccgtgaccagctacctgagcctgagcacccatgcagagccctacacgcgcagggccctggccaccgaggtcaccgccggcctgctatcgctgctgccctccatgcccttgaattggccctacctgaaggtccttggccagaccttcatcaccgtgcctgtcggccacctggtcgtcctcaacgtcagcgtcccgtgcctgctctatgtctacctgctctatctcttcttccgcatggcacagctgaggaatttcaagggcacctactgctaccttgtgccctacctggtgtgcttcatgtggtgtgagctctccgtggtcatcctgctggagtccaccggcctggggctgctccgcgcctccatcggctacttcctcttcctctttgccctccccatcctggtggccggcctggccctggtgggcgtgctgcagttcgcccggtggttcacgtctctggagctcaccaagatcgcagtcaccgtggcggtctgtagtgtgcccctgctgttgcgctggtggaccaaggccagcttctctgtggtggggatggtgaagtccctgacgcggagctccatggtcaagctcatcctggtgtggctcacggccatcgtgctgttctgctggttctatgtgtaccgctcagagggcatgaaggtctacaactccacactgacctggcagcagtatggtgcgctgtgcgggccacgcgcctggaaggagaccaacatggcgcgcacccagatcctctgcagccacctggagggccacagggtcacgtggaccggccgcttcaagtacgtccgcgtgactgacatcgacaacagcgccgagtctgccatcaacatgctcccgttcttcatcggcgactggatgcgctgcctctacggcgaggcctaccctgcctgcagccctggcaacacctccacggccgaggaggagctctgtcgccttaagctgctggccaagcacccctgccacatcaagaagttcgaccgctacaagtttgagattaccgtgggcatgccattcagcagcggcgctgacggctcgcgcagccgcgaggaggacgacgtcaccaaggacatcgtgctgcgggccagcagcgagttcaagagcgtgctgctcagcctgcgccagggcagcctcatcgagttcagcaccatcctggagggccgcctgggcagcaagtggcctgtcttcgagctcaaggccatcagctgcctcaactgcatggcccagctctcacccaccaggcggcacgtgaagatcgagcacgactggcgcagcaccgtgcatggcgccgtgaagttcgccttcgacttctttttcttcccattcctgtcggcggcctgaggatggtccgccacgaggagcttccagtgcatgttgccatgaggcctttccccagtgtggccccagcccgacaggcatgcaccagtgccgcctgtgcccacgtgtgcagactgtggctgcagagaccttgcgaccatgtgtagattgcgtggaccccgacaaagggaaggctgctgtgtagctctgtccactctgaataccaagtgtgttgggaattgcatgccatctccaccctgagcctgacctttctgagtgacatgggtgtgccaggctagactaggaggttccggtgtctggaaaagcactttacagatgagattccctctcctcccccaccttcaagcaccctgttccctctttctttcttttgtgttggatttgtttaaaaaccaaataagcatctgtgtaacctccacagtagcatttcttatttgtttggtcactgctacaccttagcagctcttcccctttcctgggggatgtgcacggcagcttgagcctgtcacgtggtcaaggcccggccccatcagaggctgggggaggcggcacattggcagtgtgtcacactgagctgggcaccacaggctgcctcatgaccctcctgtccagcaggtagtgggtgaatgtgtgaaggtcttgcctgaatccatcaggacttgggaaacagagaaccctgtgggggcggctgtgggggaggtccctgccagtgtttagaagagcctgactgtgttcagtgccttggagcagaaagccagggtcctgagtggctgaaataaaagcctctggtggaacctgca

SEQ ID NO: 118 - DNA, 1820 bp, Homo sapiens
ggcgctgggcggctgcggcgcgcggtgcgcggtgcgtagtctggagctatggtggtggtggcagccgcgccgaacccggccgacgggacccctaaagttctgcttctgtcggggcagcccgcctccgccgccggagccccggccggccaggccctgccgctcatggtgccagcccagagaggggccagcccggaggcagcgagcggggggctgccccaggcgcgcaagcgacagcgcctcacgcacctgagccccgaggagaaggcgctgaggaggaaactgaaaaacagagtagcagctcagactgccagagatcgaaagaaggctcgaatgagtgagctggaacagcaagtggtagatttagaagaagagaaccaaaaacttttgctagaaaatcagcttttacgagagaaaactcatggccttgtagttgagaaccaggagttaagacagcgcttggggatggatgccctggttgctgaagaggaggcggaagccaaggggaatgaagtgaggccagtggccgggtctgctgagtccgcagcactcagactacgtgcacctctgcagcaggtgcaggcccagttgtcacccctccagaacatctccccatggattctggcggtattgactcttcagattcagagtctgatatcctgttgggcattctggacaacttggacccagtcatgttcttcaaatgcccttccccagagcctgccagcctggaggagctcccagaggtctacccagaaggacccagttccttaccagcctccctttctctgtcagtggggacgtcatcagccaagctggaagccattaatgaactaattcgttttgaccacatatataccaagcccctagtcttagagataccctctgagacagagagccaagctaatgtggtagtgaaaatcgaggaagcacctctcagcccctcagagaatgatcaccctgaattcattgtctcagtgaaggaagaacctgtagaagatgacctcgttccggagctgggtatctcaaatctgctttcatccagccactgcccaaagccatcttcctgcctactggatgcttacagtgactgtggatacgggggttccctttccccattcagtgacatgtcctctctgcttggtgtaaaccattcttgggaggacacttttgccaatgaactctttccccagctgattagtgtctaaggaatgatccaatactgttgcccttttccttgactattacactgcctggaggatagcagagaagcctgtctgtacttcattcaaaaagccaaaatagagagtatacagtcctagagaattcctctatttgttcagatctcatagatgacccccaggtattgtcttttgacatccagcagtccaaggtattgagacatattactggaagtaagaaatattactataattgagaactacagcttttaagattgtacttttatcttaaaagggtggtagttttccctaaaatacttattatgtaagggtcattagacaaatgtcttgaagtagacatggaatttatgaatggttctttatcatttctcttccccctttttggcatcctggcttgcctccagttttaggtcctttagtttgcttctgtaagcaacgggaacacctgctgagggggctctttccctcatgtatacttcaagtaagatcaagaatcttttgtgaaattatagaaatttactatgtaaatgcttgatggaattttttcctgctagtgtagcttctgaaaggtgctttctccatttatttaaaactacccatgcaattaaaaggtacaatgca

1. A method of delivering a recombinant virus to a skin tissue comprising
applying ultrasound to the skin tissue, and
administering the recombinant virus to the skin tissue.

2. The method of claim 1 wherein the recombinant virus is delivered to the skin tissue of a subject in vivo.

3. The method of claim 2 wherein the skin tissue comprises native and autogeneic, isogeneic, xenogeneic and allogeneic skin tissue.

4. The method of claim 1 wherein the recombinant virus is delivered to the skin tissue in vitro.

5. The method of claim 4 wherein the skin tissue comprises skin explants and artificial skin tissues.

6. The method of claim 1 wherein the ultrasound is applied prior to administering the recombinant virus.

7. The method of claim 1 wherein the ultrasound is stopped prior to administering the recombinant virus.

8. The method of claim 1 wherein the ultrasound is applied at a frequency between about 20 kHz and about 100 kHz.

9. The method of claim 1 wherein the ultrasound is applied at an intensity between about 1 W/cm² and about 10 W/cm².

10. The method of claim 1 wherein the ultrasound is applied for a duration between about one minute to about 10 minutes.

11. The method of claim 1 wherein the ultrasound is applied at duty cycles in the range of 25%, 50%, 75% or 100%.

12. The method of claim 1 wherein the ultrasound is applied topically or intra-dermally.

13. The method of claim 1 further comprising delivering the recombinant virus to the skin tissue via electroporation, heat, needleless injections, pressure waves generated by laser radiation, fraction laser, or radiofrequency (100 kHz), magnetophoresis by external magnetic field, iontophoresis, chemical peels, abrasion techniques including diamond or sand paper abrasion, tape stripping, and the like.

14. The method of claim 1 wherein the recombinant virus is selected from retrovirus, adenovirus, adeno-associated virus (AAV), vaccinia virus and herpes simplex virus.

15. The method of claim 14 wherein the recombinant AAV includes serotypes 1-9.

16. The method of claim 1 wherein the recombinant virus comprises a heterologous nucleic acid sequence.

17. The method of claim 16 wherein the nucleic acid sequence encodes a gene which is expressible in the skin tissue.

18. The method of claim 17 wherein expression of the gene effects treatment of a skin disease or condition.

19. The method of claim 17 wherein the gene is selected from COL1A1, COL3A1, TIMP1, TIMP2, SMAD2, SMAD3, CTGF, TGF-beta1, KRT6A, NOTCH1(icd), TET2, TET3, Sirt1, Sirt6, HIF-1a, Pten, Pck1, Pparg, and Cisd2, MDH1/2, Aco1/2, IDH1/2/3, Enolase, GOT1/2, MUC1, and MCU.

20. (canceled)

21. The method of claim 1 wherein the skin disease or condition includes Epidermolysis Bullosa, Recessive Dystrophic Epidermolysis Bullosa, Junctional Epidermolysis Bullosa, Epidermolysis Bullosa Simplex, Pachyonychia Congenita, Melanoma, non-melanoma skin cancer, Ichthyosis, Harlequin Ichthyosis, Sjogren-Larsson Syndrome, Xeroderma Pigmentosum, Wound Healing, Netherton Syndrome, age-associated skin pathologies, benign and malignant skin lesions, inflammatory and autoimmune skin disorders.

22. The method of claim 1 wherein the recombinant virus is delivered to keratinocytes, epidermal stem cells, fibroblast cells, mesenchymal stem cells, immune cells, melanocytes, vascular endothelial cells, adipocytes, Merkel cells and peripheral neural cells of the skin tissue.

23. The method of claim 1 wherein the recombinant virus is delivered to skin tissue layers and structures including stratum corneum, epidermis, basement membrane, dermis, hair follicles, blood vessels and sebaceous and eccrine glands.

24. The method of claim 1 wherein multiple recombinant viruses comprising multiple genes are delivered to the skin tissue.

25. The method of claim 2 wherein the subject is human or non-human mammal.

26. (canceled)

27. A recombinant virus comprising a heterologous nucleic acid sequence.

28. The recombinant virus of claim 27 wherein the nucleic acid sequence encodes a gene which is expressible in a skin tissue.

29. The recombinant virus of claim 28 wherein expression of the gene effects treatment of a skin disease or condition.

30. The recombinant virus of claim 28 wherein the gene is selected from COL1A1, COL3A1, TIMP1, TIMP2, SMAD2, SMAD3, CTGF, TGF-beta1, KRT6A, NOTCH1(icd), TET2, TET3, Sirt1, Sirt6, HIF-1a, Pten, Pck1, Pparg, Cisd2, MDH1/2, Aco1/2, IDH1/2/3, Enolase, GOT1/2, MUC1, and MCU.

31. (canceled)

32. The recombinant virus of claim 27 wherein the recombinant virus is selected from retrovirus, adenovirus, adeno-associated virus (AAV), vaccinia virus and herpes simplex virus.

33. The recombinant virus of claim 32 wherein the recombinant AAV includes serotypes 1-9.

34. A method of delivering a polypeptide to a skin tissue comprising
applying ultrasound to the skin tissue, and
administering a nucleic acid sequence encoding the polypeptide to the skin tissue.

35.-58. (canceled)

59. A heterologous nucleic acid sequence encoding a gene which is expressible in a skin tissue.

60. (canceled)

61. The heterologous nucleic acid sequence of claim 59 wherein the gene is selected from COL1A1, COL3A1, TIMP1, TIMP2, SMAD2, SMAD3, CTGF, TGF-beta1, KRT6A, NOTCH1(icd), TET2, TET3, Sirt1, Sirt6, HIF-1a, Pten, Pck1, Pparg, Cisd2, MDH1/2, Aco1/2, IDH1/2/3, Enolase, GOT1/2, MUC1, and MCU.

62. (canceled)

63. The method of claim 17 wherein the gene further comprises sequences of SEQ ID NOS 1-122.
